(19) United States
(12) Patent Application Publication
(10) Pub. No.: US 2005/0100554 A1
(43) Pub. Date: May 12, 2005

(54) Complexes and methods of using same

(76) Inventors: Amanda Jackson, Paris (FR); Chean Eng Ooi, Branford, CT (US); David Lewin, New Haven, CT (US); Scott Cuthill, Oxfordshire (GB)

Correspondence Address: MINTZ, LEVIN, COHN, FERRIS, GLOVSKY;AND POPEO, P.C., ONE FINANCIAL CENTER, BOSTON, MA, 02111, US

(21) Appl. No.: 10/367,057

(22) Filed: Feb. 14, 2003

Related U.S. Application Data
(60) Provisional application No. 60/356,911, filed on Feb. 14, 2002.

(51) Int. Cl. C07H 21/04; C12P 21/04; A61K 39/00; C07K 14/47; C07K 16/18

(52) U.S. Cl. 424/192.1; 435/69.7; 435/320.1; 435/325; 530/350; 530/388.25; 536/23.5

(57) ABSTRACT

The invention provides complexes of at least two polypeptides, and methods of using the same. Purified complexes of two polypeptides are provided, including chimeric complexes, and chimeric polypeptides and complexes thereof are also provided, as are nucleic acids encoding chimeric polypeptides and vectors and cells containing the same. Also provided are methods of identifying agents that disrupt polypeptide complexes, methods of identifying complex or polypeptide in a sample, and for removing the same, methods of determining altered expression of a polypeptide in a subject, and methods of treating/preventing disorders involving altered levels of complex or polypeptide.

### RELATED APPLICATIONS

[0001] This application claims priority from U.S. Ser. No. 60/256,911 filed Feb. 14, 2002 the contents of which are incorporated by reference in their entirety.

### FIELD OF THE INVENTION

[0002] The invention relates generally to polypeptides and complexes of two or more polypeptides, as well as to methods of use thereof.

### BACKGROUND OF THE INVENTION

[0003] Greater than seventy types of human papilloma virus (HPV) are recognized, each type associated with a specific clinical manifestation. (Principles of Internal Medicine, Fauci et al, pp. 190-1100, 14^{th} edition, McGraw Hill). It is predicted that as many as 1-2% of sexually active individuals have genital warts induced predominantly by various types of HPV. Infection may results in a spectrum of epithelial proliferative disorders ranging from common warts through genital warts to invasive cervical cancer. Currently, HPV is the most common sexually transmitted disease and is the etiological agent for 99.7% of all cervical cancers including a number of other cancers such as cancer of the anogenital tract, cancer of the oral cavity, head, neck, and larynx (Walboomers, et al., J Pathol 189 (1): 12-9 (1999); Munoz, J Clin Virol 19 1-2): 1-5 (2000); Gillison, et. al., Curr Opin Oncol 13 (3): 183-8 (2001)). Cervical cancer has a very high survival rate (95% for Stage IA and 80% for Stage IIA) of five-years and is highly tractable to treatment when caught early. The progression of disease is relatively slow compared to many cancers. In later stages, such as IIB, III, or IVA, the five-year survival rate drops off precipitously (65, 40, and 20 percent, respectively) (Cannistra, et al., N Engl J Med 334 (16): 1030-8 (1996)).

[0004] HPV genomes are highly conserved and express only eight proteins two of which are capsid proteins (L1 and L2). The other proteins (E1, E2 and E4) are nonstructural and are involved in the replication and transcription of the HPV genome. E1 is a helicase and represents the only enzyme function that encodes HPV. The remaining proteins function via protein-protein or protein-DNA interactions within the infected cell.

[0005] HPV has to facilitate its own replication within terminally differentiating (non-replicating) host cells. Important to the viral proliferation is the expression of early genes from the viral genome, E5, E6, and E7. HPV pathogenesis requires the availability of epidermal and mucosal epithelial cells that are still capable of proliferation. E5, E6 and E7 proteins are involved in the aberrant proliferation of the epithelial basal layer such that there is enhanced proliferation and lateral expansion of the basal layer (zur Hausen, Biochim Biophys Acta 1288 (2): F55-78 (1996)).

[0006] Cancer caused by HPV is due to the integration, and subsequent expression, of viral E6 and E7 proteins. E6 interacts with p53 (Werness, et al., Science 248 (4951): 76-9 (1990)). and affects the expression of the catalytic subunit of telomerase (hTERT) and Rb (Dyson et al. Science 243(4893): 934-7 (1989); Kiyono et al., Natural 396(6706): 84-8 (1998)). E6 and E7 work synergistically to transform cells (Munger, et al. J Virol 63 (10): 4417-21 (1989); McDougall, Curr Top Microbiol Immunol 186: 101-19 (1994)). E5 is not required for long-term transformation, however it is known to interact with growth factor receptors that mediate cellular proliferation, such as the epidermal growth factor receptor, the platelet-derived growth factor-β receptor, and the colony-stimulating factor-1 receptor (Hwang, et al., Virology 211(1): 227-33 (1995)). The E6 and E7 proteins of HPV maintain infected keratinocytes in a cycling undifferentiated state by blocking p53- and RB-mediated cell-cycle control pathways. U.S. Pat. No. 5,532,348 describes the purification of the E6 protein and methods of blocking the inhibitory effect of E6 on tumor suppressor protein, p53. In oncogenic indications, HPV causes alteration in cyclin-cyclin-dependent kinase complexes, as a prelude to loss of genomic stability, predisposing the cell to neoplastic transformation. E6 and E7 proteins must persist in the cell for it to remain transformed (Tindle, Nature Rev Cancer 2 (1): 59-65 (2002)).

[0007] Existing diagnostic methodologies have been described in detail in Wright, et al., Jama 287 (16): 2120-9 (2002). Papanicolaou testing (Pap smear) is the front line screen for cervical cancer testing. However this methodology is limited to reproductive and anogenital screening and does not apply for screening patients for head and neck/larynx cancers. Furthermore, the methodology is not conclusive, ambiguous Pap smear results must be clarified by PCR testing for the presence of high-risk HPV strains (Schiffman, et al., J Clin Microbiol 33 (3): 545-50 (1995)). Following a positive result from PCR testing or multiple ASCUS (Atypical Squamous Cells of Undetermined Significance) results, colposcopy (visual exam of the cervical region) and possibly a biopsy are performed to determine if premalignant or malignant lesions are present (Wright, et al., Jama 287 (16): 2120-9 (2002)).

[0008] Current therapies for HPV infection are largely ablative, ineffective and limited. Immunomodulatory cytokines show promise for the suppression of HPV transcription, for example transforming growth factor-β and interleukin-1. Retinoic acid can suppress HPV infection and may have some effect on premalignant and malignant cervical lesions. Cidovovir™, an acyclic nuycleoside phosphonate, with a broad specificity for DNA viruses can suppress HPV infection as can the immunomodulatory drug Imiquimod™. Both drugs seem to act through the stimulation of cytokines (zur Hausen, Nat Rev Cancer 2 (5): 342-50 (2002)).

[0009] Other than the avoidance of contact, resolution of the disease has not been successful. Despite the current understanding of HPV infection and replication, the detection and prevention of HPV has been difficult because the nature of replication, expression, proliferation and host protein interactions are incredibly complex. Host defense responses to HPV infection are not largely understood. The ability to identify critical HPV-host protein interactions would not only help clarify how these complicated processes are regulated but could potentially identify important new therapeutic targets and diagnostic markers.

[0010] There remains a need to elucidate biochemical pathways that specifically affect the survival or condition of host cells and to determine what molecules and/or functional elements of such molecules are responsible for regulating such pathways. There is also a need for products and processes that permit the effective regulation of specific steps in such biochemical pathways. The identification of protein complexes associated with specific biological activities can be used to identify or prevent conditions associated with the absence or presence of these complexes.

### SUMMARY OF THE INVENTION

[0011] The invention is based, in part, upon the identification of protein-protein interactions in and humans. Interacting proteins present in complexes according to the invention are shown in, e.g., Tables 1-7, in the second and fifth columns thereof (i.e., columns 2 and 5).

[0012] In one aspect, the invention provides a purified complex including a first interactor listed in Tables 1-7 column 2, and a second interactor recited in column 5 of Tables 1-7.

[0013] In another aspect, the invention provides an antibody which specifically binds polypeptide complexes according to the invention. The antibody preferably binds to a complex comprising one or more polypeptides with greater affinity than its affinity for either polypeptide that is not present in the complex.

[0014] Also provided by the invention are kits containing reagents that can specifically detect the complexes of the invention. In one embodiment, the reagent is a complex-specific antibody, while in other embodiments the reagent is an antibody specific for the first or second polypeptides of the complex.

[0015] In another aspect, the invention provides pharmaceutical compositions including the complexes described herein. Such compositions are formulated to be suitable for therapeutic administration in the treatment of deficiencies or diseases involving altered levels of the complexes of the invention.

[0016] In still another aspect, the invention provides methods of identifying an agent that disrupts a polypeptide complex by providing a complex described herein, contacting the complex with a test agent, and detecting the presence or amount of a polypeptide in the complex.

[0017] In a further aspect, the invention provides a method for inhibiting the interaction of a protein with a ligand by contacting a complex of the protein and ligand with an agent that blocks formation of the complex.

[0018] In yet another aspect, the invention provides a method of identifying a polypeptide complex in a subject by providing a biological sample from the subject and detecting, if present, the level of a complex, described herein, in the subject. In a specific embodiment, the invention encompasses a method to monitor protein interactions or formation of the protein complexes as an indicator of specific state or condition in response to treatment with a drug or pharmaceutical. An aspect of this embodiment includes the use of antibodies, specific for the protein complex, as a reagent in a method to determine the relative abundance of the complex under various conditions or in specific tissues. Recombinant proteins may be expressed with “epitope” tags in order to easily monitor their expression and interactions.

[0019] Also provided by the invention is a method for detecting a polypeptide in a biological sample by providing a biological sample containing a first polypeptide, and contacting the sample with a second polypeptide under conditions suitable to form a polypeptide complex.

[0020] In another aspect, the invention provides a method for the detection of protein complexes used in assays to detect protein-protein interactions, wherein the interactions include full-length proteins, as well as protein fragments that interact in cell-based and in vitro assays. In another aspect, the identified protein complexes can be used in a diagnostic assay for determining a specific disease or pathological condition or state, as well as for detection of a predisposition to a disease or pathological condition. Included in this aspect is a method for the use of labeled or fusion proteins for detection, and/or the use of antibodies specific for the individual proteins or the protein complex. The method measures the ability of the proteins to form the complex, and includes the identification of mutations or single nucleotide polymorphisms (SNPs), which may affect the ability of the proteins to form the complex or function normally.

[0021] In a further aspect, the invention provides a method for determining altered expression of a polypeptide in a subject by providing a biological sample from the subject, measuring the level of polypeptide complex in the sample, and comparing the level of the complex in the sample to the level of complex in a reference sample with a known polypeptide expression level. The present invention includes a method to modulate or regulate a specific phenotype by modulating protein components or complexes, which occur in a related pathway. This can be achieved through modulation with a drug or antibody or antisense oligonucleotides, the activity of a protein or complex, the ability of a protein or complex to interact with its biological partner, or the elimination of a protein from a pathway or a complex. Such changes can be observed through monitoring modulation in gene expression of target genes, or the presence or absence of phenotype specific markers. Included as an embodiment of this aspect are vectors, antibodies, libraries of compounds, gene specific antisense oligonucleotides, and cell lines.

[0022] In a still further aspect, the invention provides a method of treating or preventing a disease or disorder involving altered levels of a complex described herein or a polypeptide described herein, by administering, to a subject in need thereof, a therapeutically-effective amount of at least one molecule that modulates the function of the complex or polypeptide. In one embodiment, the agent modulates the function of a polypeptide selected from the polypeptides recited in Tables 1-7, columns 2, 3, 5 or 6.

[0023] In the specification and the appended claims, the singular forms include plural referents unless the context clearly dictates otherwise. Unless defined otherwise, all technical and scientific terms used herein have the same meaning as commonly understood by one of ordinary skill in the art to which this invention belongs. All patents and publications cited in this specification are incorporated by reference herein in their entirety

### BRIEF DESCRIPTION OF THE DRAWINGS

[0024] FIG. 1 is is a graphical illustration showing the interactions between human host proteins and HPV 16 E5, HPV 16 E6 and HPV 16 E7 and the relevant biological events tied to the activity of proteins involved in host cell proliferation.

### DETAILED DESCRIPTION OF THE INVENTION

Definitions

[0025] The term “pre-cancerous cervical lesions” is intended to refer to those abnormalities which clinically may be described as “pre-malignant” conditions and which may, without treatment, proceed to full malignancies.

[0026] The present invention makes possible the accurate diagnosis and treatment of infections associated with HPV. The invention further clarifies the mechanism of action or biochemical pathways that lead to phenotypes indicative of a disease or abnormal condition. Preferred protein interactions include interactions described in Tables 1-7, most preferred interactions include those described in Tables 4-7. The invention further provides complexes of interacting polypeptides which have not heretofore been shown to interact directly and methods of using these complexes. In another aspect, certain interactions and complexes reveal utilities for known molecules that have not previously been associated with HPV infection. In one embodiment, interactions between viral proteins and phosphatases that regulate the activity of growth factor receptors are disclosed.

[0027] Some interacting polypeptides were identified by determining which of the predicted open-reading frames (ORFs) of the yeast encode polypeptides that interact in a yeast two-hybrid system. The interacting pairs were identified to include (i) interactions that place functionally unclassified proteins in a biological context, (ii) novel interactions between proteins involved in the same biological function, (iii) novel interactions that link together biological functions into larger cellular processes (iv) and identification of potential therapeutic targets and/or diagnostic markers useful in a human clinical setting. In a specific embodiment, protein interactions and pathways in a natural host cell which interact with critical proteins of HPV 1a, HPV 16 or HPV 11 have been identified. The interactions provide a better understanding of the biology of HPV infection as they relate to clinically related HPV strains. More specifically, the present invention provides elucidation of the biochemistry in the strains of virus that are known, respectively, to cause warts, non-cancerous lesions, and tumors. All interactors identified in this invention are potential diagnostic markers for HPV infection and a subset of these have additional value as therapeutic targets. The interactions of the invention are listed in Tables 1 through 7 below. In one embodiment, tabular data depicted in the tables have been exemplified as in FIG. 1.

[0028] Prey identified from screens of different tissues were directly tested against all baits from HPV 1, 11, and 16 directly as well as the converse test which is the basis of the one-by-one matrix reaction through Pathcalling (see also U.S. Pat. Nos. 6,057,101 and 6,083,693). A subset of the observed interactions was observed to be specific for each strain tested and others were observed to be conserved interactions for all the strains tested. For example, those interactions that were specific for HPV 16 were analyzed for their potential role in the development of malignancies. Those interactions that were unique to low risk strains are indicative of low-risk infection and the associated consequences, such as common warts (HPV 1a) and benign cervical lesions (HPV 11). Interactions common to both HPV 11 and HPV 16 are relevant to cervical infection, while those common to HPV 1a and HPV 11 are relevant to benign response to infection. All of the above interactions, and the interactions common to any two or more HPV strains are relevant to the general phenomenon of warts.

[0029] New insights into novel interactions between proteins involved in the same biological function are also provided. In one embodiment, proteins involved in inactivation of the discs large tumor (DLG) suppressor have been described in Kuhne, et al., Oncogene 30:18(40) pp. 5487-596 (1999). The present invention describes the novel interaction between proteins HPV16 E6 or E7 with DLG that is related to proteosome-mediated degradation. In another embodiment, HPV16 E6 and ubiquitin-specific protease 9 as well as HPV16 E7 and proteosome 26S subunit are novel interactions. These protein interactions may indicate their involvement in proteosome-mediated degradation.

[0030] In another aspect, the interactions described by the present invention provide new insights into E6 and E7 mechanisms of action. E7 may enhance the transforming activity of E6 by binding to and inactivating downstream tumor suppressor effects of p53. Because E6 and E7 have several common interactors, concerted action on common biological pathways is indicated. E6 and E7 tranforming activity may also be mediated by interactions with other candidate tumor suppressor or proteins involved in cellular proliferation and apoptosis. Therefore, inhibition or regulation of these interactions are suitable as targets for candidate therapeutics.

[0031] In another embodiment, interaction was also identified between complexes of HPV16 E6 and TCP-1, proteosome subunit PMSC1 and syntaxin 4. The interactions have relevance to tumor suppression via protein folding, unfolding and trafficking pathways. Such interactions provide opportunities to develop tools against various pathologic situations in which signaling through these proteins via p53 which are involved in cancer.

[0032] The newly identified protein-protein interactions pf the present invention connect biological functions into larger cellular processes. For example, FIG. 1 depicts a diagram of the protein-protein interactions and the relevant biological events tied to the activity of proteins involved in host cell proliferation described in Table A. Viral proteins are depicted as hatched circles, human proteins as closed circles, and the solid lines between the circles represent the physical interactions observed as a consequence of the yeast two-hybrid matrix assay. The broken arrow indicates the predicted direct/indirect activity of PTPN2 as an enzyme that may directly or indirectly affect signal transduction activity of EGFR in the presence of its ligand (Boonstra, Rijken et al. 1995).

TABLE A

| INT | cbe_SEQ CG | COMMON | PT/AT/ | cbe_SEQ CG ID | COMMON | | |
|---|---|---|---|---|---|---|---|
| ID | ID Interactor A | NAME INT A | SMT/NA | Interactor B | NAME INT B | PT/AT/SMT/NA | Screen/Matrix/MS |
| 160 | cbe_251445 | HPV 16 E6 | NA | cbe_2576474 | PTPN2 | SMT | MatrixMating/PathCalling |
| 165 | cbe_251448 | HPV 16 E7 | NA | cbe_422236 | BCR1 | SMT | MatrixMating/PathCalling |
| 198 | cbe_422236 | BCR1 | SMT | cbe_2576474 | PTPN2 | SMT | MatrixMating |
| 618 | cbe_422236 | BCR1 | SMT | cbe_251445 | HPV 16 E6 | NA | MatrixMating |

[0033] The viral life cycle of HPV has been well described in both general terms and in terms of HPV's role in cancer (zur Hausen 2002). In short, the basal layer of cells of epithelia depicted in this figure is typically infected by HPV as a result of the exposure of the cells to virus that has penetrated via microlesions. Viral proliferation, formation, and egress from the host is coordinated with the proliferation of the basal layer of cells and their differentiation into keratinocytes. As the keratinocytes mature they release the mature viral particles. Part of the viral life cycle includes the induction of the lateral proliferation of the basal layer. Under normal conditions the proliferation is in a vertical direction as indicated. The co-opting of the proliferative capacity of the basal layer of cells is essential for the successful reproduction of the virus; therefore it is essential that the virus take control of this process.

[0034] In some circumstances, co-opting of the proliferation results in a benign lesions. In other cases the results may lead to a cancer in a susceptible tissue such as the cervix. HPV16 is well known to induce cancers of the anogenital tract as well as oral-laryngeal cancers. This highly frequent consequence of chronic HPV 16 infection is the result of the integration of two viral proto-oncogenes, HPV 16 E6 and HPV 16 E7. One or both of these proteins is capable of transforming cells independently of viral infection when transformed into cells (Munger, Phelps et al. 1989; zur Hausen 2002). HPV 16 E5 is known to play a role early in infection by interacting with epidermal growth factor receptor (EGFR) (Hwang, Nottoli et al. 1995; zur Hausen 2002). EGFR is a growth factor receptor whose activity is controlled by its phosphorylation state. Phosphorylated EGFR (EGFR-P) is the consequence of ligand binding and leads to the induction of proliferative intracellular signals (Boonstra, Rijken et al. 1995). PTPN2 is a poorly characterized protein tyrosine phosphatase that can dephosphorylate phospho-tyrosine (Johnson, Cool et al. 1993). The importance of tyrosine dephosphorylation in regulating enzymatic activity has been demonstrated for EGFR (Boonstra, Rijken et al. 1995). Breakpoint cluster region 1 protein (BCR1) is a GTPase-activating protein (GAP) for RAC1 and CDC42 and promotes the exchange of RAC or CDC42-bound GDP by GTP, thereby activating them (Ahmed, Lee et al. 1994). CDC42 is well known to affect cell polarity (Takai, Sasaki et al. 2001).

[0035] Some newly disclosed interactions (INT 160, 165, 198, and 618) provide new biological context for these proteins as well as strongly indicating a previously unanticipated functional role for HPV 16 proteins as individual entities as well as components of a complex present in active infections. A diagnostic device that measures the presence of complexes of proteins is the basis to identify active infection as opposed to a late stage infection under which circumstances the transforming consequence of the infection is the result of the integration and aberrant expression of HPV 16 E6 and/or HPV 16 E7. HPV 16 E5 protein's role occurs early in the viral life cycle (zur Hausen 2002).

[0036] Novel interactions between HPV 16 and the cell polarity pathway controlled by CDC2 via the direct interactions between HPV 16 viral oncogenes E6 and E7 (INT 165 and INT 618, and indirectly via INT 160 and INT 198) indicates that agents which affect the activity of BCR1 and other GAPs or other effectors of CDC42, such as guanine nucleotide exchange factors (GEFs), or enzymes involved in the post translation modification of CDC42 but not previously associated with HPV infection, are drug targets for the treatment of HPV infection. Any existing agent that affects the activity of enzymes in the CDC42-mediated polarity pathway are suitable as drugs for the treatment of HPV infection. Therefore treatment of HPV infection includes treatment modes which inhibit the ability of HPV to cause basal layer cells proliferation.

[0037] In one embodiment, INT 160, INT 198, and INT 165 show direct and indirect interactions between HPV 16 viral oncogenes and PTPN2. Phosphatases play a role in the signal transduction pathways necessary for cellular proliferation (Carr, Wang et al. 2002) which has been indicated as a consequence of HPV infection of the basal layer cells (zur Hausen 2002). Agents that affect the activity of PTPN2 may be used to treat HPV16 infection. Treatment of the infection early will reduce the chance of HPV proto-oncogene insertion into the host genome, thereby reducing the probability of tumor induction. In summary, EGFR and CDC42 play roles in cellular proliferation. HPV co-opts the activity of these pathways via novel interaction with PTPN2 and BCR1 as identified by the present invention. Therefore, clinical intervention in these pathways is to treat HPV infection is encompassed by the present invention. Identification of the interactions described in FIG. 1 leads to diagnosis of an active HPV infection at an early stage possible to intervene in the course of the infection and the course of the disease leading to conditions as mild as warts and as severe as tumors.

[0038] The complexes disclosed herein are also useful, inter alia, in identifying agents that modulate cellular processes in which one or more members of the complex have previously been associated. For example, many of the interacting proteins identified by INT ID numbers as shown in Tables 1 through 7, have been previously implicated inter alia, in cell growth, cell division, and/or DNA synthesis, protein synthesis, folding or turnover and vesicle trafficking molecules. Accordingly, new agents which modulate cell growth, cell division, and/or DNA synthesis can be identified by evaluating the ability of a test agent to affect formation or dissolution of a complex having INT ID numbers described herein.

[0039] Complexes according to the invention can also be used in methods for identifying desired polypeptides in a biological sample by forming a complex of a first polypeptide and a second polypeptide that interacts with the first polypeptide. The presence of the complex indicates that the sample contains the first polypeptide.

[0040] The complexes of the invention are useful treating, e.g., alleviating a symptom of, preventing, diagnosing, or screening for compounds to treat or prevent disorders associated with HPV invention. For example, HPV, the human papilloma virus, has been linked to many cancers (e.g., cervical cancer) and intraepithelial neoplasias (commonly called dysplasias, i.e., abnormal cell growth that is generally considered to be precancerous when it occurs in the female reproductive system). Although most of the research that has been done on these conditions is in the female reproductive tract (especially the cervix, but also the vulva and vagina), the virus is linked to cancers and precancerous conditions in all of the following: eye, lung, skin, anus, penis, prostate, esophagus, and stomach.

[0041] Symptoms of HPV infection include for example, genital warts are growths or bumps that appear on the vulva, in or around the vagina or anus, on the cervix, or on the penis, scrotum, groin (where the genital area meets the inner thigh). They may be raised or flat, single or multiple, small or large.

[0042] The Pap test is the major front-line test for dysplasia. During this test, cells are taken from the cervical area and examined under a microscope for abnormalities. There are two different systems for classifying dysplasia.

[0043] The Bethesda, or SIL (squamous intraepithelial lesion) System looks only at individual cells, generally from a Pap test, and classifies them according to the degree of cell abnormality. These break down into:

[0044] ASCUS (atypical squamous cells of undetermined significance) means the cells aren't quite right, but they aren't clearly dysplastic, either. This can be caused by a lot of different factors, including hormonal changes, yeast or other infections, medications, or other sources of inflammation. HPV testing is sometimes done at this point. AGUS or AGCUS (atypical glandular cells of undetermined significance) is a finding of atypical glandular cells. This is less common, but since a different type of cancer (adenocarcinoma) develops from glandular (mainly the columnar) cells, this is usually followed up right away with more testing. Adenocarcinoma often doesn't have the extended precancerous phase that squamous cell carcinoma does.

[0045] LSIL—low grade squamous intraepithelial lesion—this is also called “mild dysplasia”, however, the true degree and extent of the dysplasia can only be determined upon further evaluation of the cervix itself. Since most LSIL “regresses”—that is, returns to normal without treatment, a woman with LSIL may be advised to return for another Pap test in a few months.

[0046] HSIL—high grade squamous intraepithelial lesion—this type of Pap result will always be evaluated further and treated, as it detects cell changes that have progressed beyond the mild stage.

[0047] CIN system—The other major system of classifying dysplasia is called the CIN system, for cervical intraepithelial neoplasia. There are corresponding classifications for vaginal and vulvar dysplasia called VAIN and VIN. This system of classification is based both on the degree of dysplasia in the individual cells (like SIL) and how far below the surface of the cervix the dysplasia goes.

[0048] CIN I—corresponds to mild dysplasia or LSIL. Additionally, the abnormal cells are only on the very surface of the cervix. As stated under SIL, most of these will regress back to normal over time. About 11% will progress to CIN 3. Only a very small percentage of CIN I leads to cancer.

[0049] CIN 2—corresponds to moderate dysplasia or HSIL. About half of the thickness of the epithelium is abnormal (dysplastic). Left alone, about 43% of CIN 2 will regress back to normal, and 20% will progress to CIN 3.

[0050] CIN 3—corresponds to severe dysplasia or HSIL. All or almost all of the epithelium is dysplastic. Although some CIN 3 will spontaneously regress, this is almost always treated since the next step is cancer. This is sometimes also referred to as carcinoma in situ.

[0051] These utilities, as well as additional utilities, are discussed in greater detail below.

Purified Polypeptide Complexes

[0052] In one aspect, the invention includes a purified complex that includes two or more polypeptides. In one embodiment, the invention provides purified complexes of two or more polypeptides. One of the polypeptides includes a polypeptide selected from the polypeptides recited in Tables 1 through 7, column 2 (referenced as cbe_SEQ ID Interactor A) and another includes a polypeptide selected from the polypeptides recited in Table 1 through 7, column 5 (referenced as cbe_SEQ ID Interactor B). In preferred embodiments the first and second polypeptides of the complex are the polypeptides enumerated in Tables 4-7. In some embodiments a first polypeptide is listed as a “bait” polypeptide and a second polypeptide is denoted as “prey” polypeptide, while in other embodiments the first polypeptide corresponds to a “prey” polypeptide and the second is a “bait” polypeptide.

[0053] By “corresponding polypeptide” is meant, with reference to Tables 1-7, the polypeptide recited in the same row, reading across from left to right or right to left, as a specific selected peptide. For example, in Table 3, in the first row, the corresponding polypeptide of cbe_{—}251059 is cbe_{—}2599246 (Prey 1054152) These protein pairs are designated as INT ID 137 as is indicated in Table 3. In the second row, however, the corresponding polypeptide of cbe_{—}251059 is cbe_{—}2789381 (Prey 775). These protein pairs are designated as INT ID 138.

[0054] Also as used herein, “protein” and “protein complex” are used synonymously with “polypeptide” and “polypeptide complex.” A “purified” polypeptide, protein or biologically active portion thereof is substantially free of cellular material or other contaminating proteins from the cell or tissue source from which the polypeptide is derived, or substantially free from chemical precursors or other chemicals when chemically synthesized. The language “substantially free of cellular material” includes preparations of protein in which the protein is separated from cellular components of the cells from which it is isolated or recombinantly produced. In one embodiment, the language “substantially free of cellular material” includes preparations of polypeptide complex having less than about 30% (by dry weight) of non-complex proteins (also referred to herein as a “contaminating protein”), more preferably less than about 20% of contaminating protein, still more preferably less than about 10% of contaminating protein, and most preferably less than about 5% non-complex protein. When the polypeptide or complex is recombinantly produced, it is also preferably substantially free of culture medium, i.e., culture medium represents less than about 20%, more preferably less than about 10%, and most preferably less than about 5% of the volume of the protein preparation.

TABLE 1
HPV 1a specific interactions.

| INT | cbe_SEQ ID | COMMON | | cbe_SEQ ID | COMMON | | PathCalling Screen and/or |
|---|---|---|---|---|---|---|---|
| ID | Interactor A | NAME INT A | PT/AT/SMT/NA | Interactor B | NAME INT B | PT/AT/SMT/NA | Matrix Assay |
| 383 | cbe_1710 | QP-C | NA | cbe_251917 | HPV 1a E2 | NA | PathCalling |
| 384 | cbe_22607 | Hs.101882 | NA | cbe_251740 | HPV 1a E1-E4 | NA | PathCalling |
| 385 | cbe_92628 | FTHP1 | NA | cbe_251919 | HPV 1a E6 | NA | PathCalling |
| 393 | cbe_251740 | HPV 1a E1-E4 | NA | cbe_251740 | HPV 1a E1-E4 | NA | MatrixMating |
| 394 | cbe_251740 | HPV 1a E1-E4 | NA | cbe_251777 | Prey2316 | NA | PathCalling |
| 395 | cbe_251740 | HPV 1a E1-E4 | NA | cbe_251900 | Prey2598 | NA | PathCalling |
| 396 | cbe_251740 | HPV 1a E1-E4 | NA | cbe_1380530 | RPL13 | NA | PathCalling |
| 397 | cbe_251740 | HPV 1a E1-E4 | NA | cbe_1796502 | CTNND2 | NA | PathCalling |
| 398 | cbe_251740 | HPV 1a E1-E4 | NA | cbe_1807361 | FLJ22729 | NA | PathCalling |
| 399 | cbe_251740 | HPV 1a E1-E4 | NA | cbe_2685998 | Prey2313 | NA | PathCalling |
| 400 | cbe_251740 | HPV 1a E1-E4 | NA | cbe_2830508 | Prey142356 | NA | PathCalling |
| 401 | cbe_251740 | HPV 1a E1-E4 | NA | cbe_3478832 | gbh_y14735 | NA | PathCalling |
| 402 | cbe_251740 | HPV 1a E1-E4 | NA | cbe_3705944 | TNFAIP1 | NA | PathCalling |
| 403 | cbe_251740 | HPV 1a E1-E4 | NA | cbe_3764052 | CKM | SMT | PathCalling |
| 404 | cbe_251740 | HPV 1a E1-E4 | NA | cbe_3833533 | TRIM29 | NA | PathCalling |
| 405 | cbe_251740 | HPV 1a E1-E4 | NA | cbe_3927174 | SCP2 | SMT | PathCalling |
| 406 | cbe_251740 | HPV 1a E1-E4 | NA | cbe_4138433 | KIFAP3 | NA | PathCalling |
| 407 | cbe_251740 | HPV 1a E1-E4 | NA | cbe_4267981 | TNNC1 | NA | PathCalling |
| 408 | cbe_251740 | HPV 1a E1-E4 | NA | cbe_4383836 | KIAA0905 | NA | PathCalling |
| 409 | cbe_251740 | HPV 1a E1-E4 | NA | cbe_4567083 | Prey1207 | NA | PathCalling |
| 410 | cbe_251917 | HPV 1a E2 | NA | cbe_251976 | Prey2777 | NA | MatrixMating/PathCalling |
| 411 | cbe_251917 | HPV 1a E2 | NA | cbe_1469980 | FLJ20259 | NA | MatrixMating/PathCalling |
| 412 | cbe_251917 | HPV 1a E2 | NA | cbe_2826346 | RPS10 | NA | PathCalling |
| 413 | cbe_251917 | HPV 1a E2 | NA | cbe_2830508 | Prey142356 | NA | PathCalling |
| 414 | cbe_251917 | HPV 1a E2 | NA | cbe_3345510 | COX6C | SMT | PathCalling |
| 415 | cbe_251917 | HPV 1a E2 | NA | cbe_3583511 | MGC3222 | NA | PathCalling |
| 416 | cbe_251917 | HPV 1a E2 | NA | cbe_3625721 | EIF2B2 | NA | PathCalling |
| 417 | cbe_251917 | HPV 1a E2 | NA | cbe_3641816 | ANKH | NA | PathCalling |
| 418 | cbe_251917 | HPV 1a E2 | NA | cbe_3826540 | Hs.98226 | NA | MatrixMating/PathCalling |
| 419 | cbe_251917 | HPV 1a E2 | NA | cbe_4268532 | Prey1053593 | NA | PathCalling |
| 420 | cbe_251917 | HPV 1a E2 | NA | cbe_4269834 | GNB2L1 | NA | MatrixMating/PathCalling |
| 421 | cbe_251917 | HPV 1a E2 | NA | cbe_4270118 | Hs.211143 | NA | PathCalling |
| 422 | cbe_251919 | HPV 1a E6 | NA | cbe_251929 | Prey2672 | NA | PathCalling |
| 423 | cbe_251919 | HPV 1a E6 | NA | cbe_3461331 | MET | AT/PT/SMT | PathCalling |
| 424 | cbe_251919 | HPV 1a E6 | NA | cbe_3621798 | XPO1 | NA | PathCalling |
| 425 | cbe_251919 | HPV 1a E6 | NA | cbe_3665307 | HK1 | NA | PathCalling |
| 426 | cbe_251919 | HPV 1a E6 | NA | cbe_4267867 | ANXA2 | NA | PathCalling |
| 427 | cbe_251925 | HPV 1a E7 | NA | cbe_251953 | Prey2724 | NA | MatrixMating/PathCalling |
| 428 | cbe_251925 | HPV 1a E7 | NA | cbe_3753270 | gbh_ac004503 | NA | MatrixMating/PathCalling |
| 429 | cbe_251925 | HPV 1a E7 | NA | cbe_3760926 | gbh_al359334 | NA | MatrixMating/PathCalling |
| 430 | cbe_251925 | HPV 1a E7 | NA | cbe_3789063 | AP2M1 | NA | MatrixMating |
| 431 | cbe_251925 | HPV 1a E7 | NA | cbe_3810032 | gbh_af142421 | NA | MatrixMating/PathCalling |
| 432 | cbe_251925 | HPV 1a E7 | NA | cbe_3820530 | PGAM1 | SMT | MatrixMating/PathCalling |
| 309 | cbe_251925 | HPV 1a E7 | NA | cbe_3834015 | TFPI | AT/PT | MatrixMating |
| 433 | cbe_251925 | HPV 1a E7 | NA | cbe_4265947 | RBP4 | AT/PT | MatrixMating/PathCalling |
| 434 | cbe_251925 | HPV 1a E7 | NA | cbe_4267526 | HRIHFB2206 | NA | MatrixMating/PathCalling |
| 435 | cbe_252016 | HPV 1a L1 | NA | cbe_252039 | Prey2919 | NA | PathCalling |
| 436 | cbe_252016 | HPV 1a L1 | NA | cbe_2611002 | NR1H4 | SMT | MatrixMating/PathCalling |
| 437 | cbe_252016 | HPV 1a L1 | NA | cbe_2980052 | ARHC | SMT | PathCalling |
| 438 | cbe_252016 | HPV 1a L1 | NA | cbe_3800240 | IVD | SMT | PathCalling |
| 439 | cbe_252016 | HPV 1a L1 | NA | cbe_4268726 | NR1H2 | SMT | PathCalling |
| 440 | cbe_252016 | HPV 1a L1 | NA | cbe_4296923 | SCGB1A1 | AT/PT | PathCalling |
| 146 | cbe_251088 | HPV 16 E2 | NA | cbe_252041 | HPV 1a L2 | NA | MatrixMating |
| 441 | cbe_252041 | HPV 1a L2 | NA | cbe_252090 | Prey2820 | NA | MatrixMating |
| 442 | cbe_252041 | HPV 1a L2 | NA | cbe_2321045 | WNT2B | NA | PathCalling |
| 443 | cbe_252041 | HPV 1a L2 | NA | cbe_2603140 | Prey146 | NA | MatrixMating/PathCalling |
| 444 | cbe_252041 | HPV 1a L2 | NA | cbe_3222359 | LOC51748 | NA | PathCalling |
| 445 | cbe_252041 | HPV 1a L2 | NA | cbe_3456824 | gbh_120086 | AT | PathCalling |
| 446 | cbe_252041 | HPV 1a L2 | NA | cbe_3606990 | Prey1053670 | NA | PathCalling |
| 447 | cbe_252041 | HPV 1a L2 | NA | cbe_3770440 | gbh_af217505 | NA | MatrixMating/PathCalling |
| 448 | cbe_252041 | HPV 1a L2 | NA | cbe_3810791 | EPHB1 | NA | MatrixMating/PathCalling |
| 449 | cbe_252041 | HPV 1a L2 | NA | cbe_4248793 | GSN | AT/PT | PathCalling |
| 450 | cbe_252041 | HPV 1a L2 | NA | cbe_4268470 | HSPE1 | NA | MatrixMating/PathCalling |
| 451 | cbe_252041 | HPV 1a L2 | NA | cbe_4269628 | RIL | NA | MatrixMating |
| 452 | cbe_252041 | HPV 1a L2 | NA | cbe_4540466 | PUM1 | NA | MatrixMating/PathCalling |

[0055] TABLE 2
HPV11 specific interactions

| INT | cbe_SEQ ID | COMMON | PT/AT/ | cbe_SEQ ID | COMMON NAME | | PathCalling Screen and/or |
|---|---|---|---|---|---|---|---|
| ID | Interactor A | NAME INT A | SMT/NA | Interactor B | INT B | PT/AT/SMT/NA | Matrix Assay |
| 1 | cbe_6464 | Hs.19954 | NA | cbe_250781 | HPV 11 E2 | NA | MatrixMating/PathCalling |
| 2 | cbe_244811 | DGUOK | SMT | cbe_250777 | HPV 11 E4 | NA | MatrixMating/PathCalling |
| 5 | cbe_250777 | HPV 11 E4 | NA | cbe_862174 | MT2A | NA | MatrixMating/PathCalling |
| 6 | cbe_250777 | HPV 11 E4 | NA | cbe_1699351 | SCO1 | NA | MatrixMating/PathCalling |
| 7 | cbe_250777 | HPV 11 E4 | NA | cbe_4344185 | SRA1 | NA | MatrixMating/PathCalling |
| 8 | cbe_250781 | HPV 11 E2 | NA | cbe_251821 | Prey2419 | NA | PathCalling |
| 9 | cbe_250781 | HPV 11 E2 | NA | cbe_251826 | Prey2429 | NA | PathCalling |
| 10 | cbe_250781 | HPV 11 E2 | NA | cbe_251857 | Prey2492 | NA | PathCalling |
| 11 | cbe_250781 | HPV 11 E2 | NA | cbe_251858 | Prey2494 | NA | PathCalling |
| 12 | cbe_250781 | HPV 11 E2 | NA | cbe_366279 | Prey2439 | NA | PathCalling |
| 13 | cbe_250781 | HPV 11 E2 | NA | cbe_408167 | Prey2412 | NA | PathCalling |
| 14 | cbe_250781 | HPV 11 E2 | NA | cbe_3563252 | Hs.306083 | NA | PathCalling |
| 15 | cbe_250781 | HPV 11 E2 | NA | cbe_4269472 | MRG15 | NA | PathCalling |
| 16 | cbe_250781 | HPV 11 E2 | NA | cbe_4269571 | KRT8 | NA | PathCalling |
| 17 | cbe_250808 | HPV 11 E6 | NA | cbe_250809 | Prey152 | NA | PathCalling |
| 18 | cbe_250808 | HPV 11 E6 | NA | cbe_250895 | Prey343 | NA | PathCalling |
| 19 | cbe_250808 | HPV 11 E6 | NA | cbe_250904 | Prey365 | NA | PathCalling |
| 20 | cbe_250808 | HPV 11 E6 | NA | cbe_250906 | Prey370 | NA | PathCalling |
| 21 | cbe_250808 | HPV 11 E6 | NA | cbe_250907 | Prey372 | NA | PathCalling |
| 22 | cbe_250808 | HPV 11 E6 | NA | cbe_250908 | Prey375 | NA | PathCalling |
| 23 | cbe_250808 | HPV 11 E6 | NA | cbe_250912 | Prey385 | NA | PathCalling |
| 24 | cbe_250808 | HPV 11 E6 | NA | cbe_250922 | Prey409 | NA | PathCalling |
| 25 | cbe_250808 | HPV 11 E6 | NA | cbe_250924 | Prey413 | NA | PathCalling |
| 26 | cbe_250808 | HPV 11 E6 | NA | cbe_250925 | Prey415 | NA | PathCalling |
| 27 | cbe_250808 | HPV 11 E6 | NA | cbe_2541164 | GPRK5 | SMT | PathCalling |
| 28 | cbe_250808 | HPV 11 E6 | NA | cbe_3580897 | HSPA5 | NA | PathCalling |
| 29 | cbe_250808 | HPV 11 E6 | NA | cbe_3590661 | NUP214 | SMT | MatrixMating/PathCalling |
| 30 | cbe_250808 | HPV 11 E6 | NA | cbe_3694420 | ARHGEF2 | NA | PathCalling |
| 31 | cbe_250808 | HPV 11 E6 | NA | cbe_3929669 | CD164 | AT/PT | PathCalling |
| 32 | cbe_250808 | HPV 11 E6 | NA | cbe_4175362 | MAPK9 | SMT | PathCalling |
| 33 | cbe_250808 | HPV 11 E6 | NA | cbe_4268235 | KIAA0410 | NA | MatrixMating/PathCalling |
| 34 | cbe_250834 | HPV 11 E7 | NA | cbe_250878 | Prey302 | NA | MatrixMating/PathCalling |
| 35 | cbe_250834 | HPV 11 E7 | NA | cbe_250883 | Prey244 | NA | MatrixMating/PathCalling |
| 36 | cbe_250834 | HPV 11 E7 | NA | cbe_250888 | Prey228 | NA | MatrixMating/PathCalling |
| 37 | cbe_250834 | HPV 11 E7 | NA | cbe_3056756 | KIAA0440 | NA | MatrixMating/PathCalling |
| 38 | cbe_250834 | HPV 11 E7 | NA | cbe_3454406 | gbh_af252829 | NA | MatrixMating/PathCalling |
| 39 | cbe_250834 | HPV 11 E7 | NA | cbe_3760926 | gbh_al359334 | NA | MatrixMating/PathCalling |
| 40 | cbe_250834 | HPV 11 E7 | NA | cbe_3845697 | Hs.191063 | NA | MatrixMating/PathCalling |
| 41 | cbe_250834 | HPV 11 E7 | NA | cbe_4260642 | PTPN21 | SMT | MatrixMating/PathCalling |
| 42 | cbe_250834 | HPV 11 E7 | NA | cbe_4265947 | RBP4 | AT/PT | MatrixMating/PathCalling |
| 43 | cbe_250834 | HPV 11 E7 | NA | cbe_4268935 | RPL26 | NA | MatrixMating/PathCalling |
| 44 | cbe_250834 | HPV 11 E7 | NA | cbe_4269451 | gbh_af038159 | NA | MatrixMating/PathCalling |
| 45 | cbe_250834 | HPV 11 E7 | NA | cbe_4269681 | Hs.224712 | NA | MatrixMating/PathCalling |
| 46 | cbe_250834 | HPV 11 E7 | NA | cbe_4269818 | Hs.73680 | NA | MatrixMating/PathCalling |
| 47 | cbe_250834 | HPV 11 E7 | NA | cbe_4270015 | RPS26 | NA | MatrixMating/PathCalling |
| 48 | cbe_250834 | HPV 11 E7 | NA | cbe_4270441 | Prey1052970 | NA | PathCalling |
| 49 | cbe_250834 | HPV 11 E7 | NA | cbe_4280774 | ITGB4 | AT/PT | MatrixMating/PathCalling |
| 50 | cbe_251663 | HPV 11 E1 | NA | cbe_3643627 | DKFZP434I1735 | NA | PathCalling |
| 51 | cbe_251663 | HPV 11 E1 | NA | cbe_3842044 | PSMB3 | NA | PathCalling |
| 52 | cbe_251663 | HPV 11 E1 | NA | cbe_4269915 | gbh_u23460 | AT/SMT | PathCalling |
| 53 | cbe_251663 | HPV 11 E1 | NA | cbe_4270423 | Prey1053526 | AT | PathCalling |
| 99 | cbe_251445 | HPV 16 E6 | NA | cbe_4270015 | RPS26 | NA | MatrixMating/PathCalling |

[0056] TABLE 3
HPV16 specific interactions

| INT | cbe_SEQ CG ID | COMMON | PT/AT/ | cbe_SEQ CG ID | COMMON | PT/AT/ | |
|---|---|---|---|---|---|---|---|
| ID | Interactor A | NAME INT A | SMT/NA | Interactor B | NAME INT B | SMT/NA | Screen/Matrix/MS |
| 137 | cbe_251059 | HPV 16 E1-E4 | NA | cbe_2599246 | Prey1054152 | NA | PathCalling |
| 138 | cbe_251059 | HPV 16 E1-E4 | NA | cbe_2789381 | Prey775 | NA | MatrixMating |
| 139 | cbe_251059 | HPV 16 E1-E4 | NA | cbe_3472582 | RABIF | NA | PathCalling |
| 140 | cbe_251059 | HPV 16 E1-E4 | NA | cbe_3621899 | pcnp | NA | PathCalling |
| 141 | cbe_251059 | HPV 16 E1-E4 | NA | cbe_3880186 | FLJ20343 | NA | MatrixMating/PathCalling |
| 142 | cbe_251059 | HPV 16 E1-E4 | NA | cbe_4269156 | PCDH1 | AT/PT | PathCalling |
| 143 | cbe_251059 | HPV 16 E1-E4 | NA | cbe_4269329 | SP260 | AT | PathCalling |
| 144 | cbe_251063 | HPV 16 E1 | NA | cbe_251099 | Prey802 | NA | MatrixMating/PathCalling |
| 145 | cbe_251063 | HPV 16 E1 | NA | cbe_4465094 | Prey1053092 | NA | PathCalling |
| 146 | cbe_251088 | HPV 16 E2 | NA | cbe_252041 | HPV 1a L2 | NA | MatrixMating |
| 147 | cbe_251088 | HPV 16 E2 | NA | cbe_2321057 | EFEMP1 | AT/PT | MatrixMating/PathCalling |
| 148 | cbe_251088 | HPV 16 E2 | NA | cbe_3670766 | ACTC | NA | MatrixMating/PathCalling |
| 149 | cbe_251088 | HPV 16 E2 | NA | cbe_3922906 | BSMAP | AT | PathCalling |
| 150 | cbe_251088 | HPV 16 E2 | NA | cbe_4268208 | DAD1 | AT | MatrixMating/PathCalling |
| 151 | cbe_251088 | HPV 16 E2 | NA | cbe_4279962 | DKKL1-pending | AT/PT | PathCalling |
| 159 | cbe_251445 | HPV 16 E6 | NA | cbe_2253980 | gbh_d38112_5 | NA | MatrixMating/PathCalling |
| 160 | cbe_251445 | HPV 16 E6 | NA | cbe_2576474 | PTPN2 | SMT | MatrixMating/PathCalling |
| 161 | cbe_251445 | HPV 16 E6 | NA | cbe_4269405 | gbh_af155653 | NA | MatrixMating/PathCalling |
| 162 | cbe_251445 | HPV 16 E6 | NA | cbe_4269703 | LOC51182 | NA | MatrixMating/PathCalling |
| 99 | cbe_251445 | HPV 16 E6 | NA | cbe_4270015 | RPS26 | NA | MatrixMating/PathCalling |
| 163 | cbe_251448 | HPV 16 E7 | NA | cbe_251468 | Prey1628 | NA | MatrixMating/PathCalling |
| 164 | cbe_251448 | HPV 16 E7 | NA | cbe_251502 | Prey1609 | NA | MatrixMating/PathCalling |
| 165 | cbe_251448 | HPV 16 E7 | NA | cbe_422236 | BCR1 | SMT | MatrixMating/PathCalling |
| 166 | cbe_251448 | HPV 16 E7 | NA | cbe_2693325 | Prey1673 | NA | MatrixMating/PathCalling |
| 167 | cbe_251448 | HPV 16 E7 | NA | cbe_2898065 | Prey1620 | NA | MatrixMating/PathCalling |
| 168 | cbe_251448 | HPV 16 E7 | NA | cbe_3474077 | KRT4 | NA | MatrixMating |
| 169 | cbe_251448 | HPV 16 E7 | NA | cbe_3773649 | EEF1A1L14 | NA | MatrixMating/PathCalling |
| 170 | cbe_251448 | HPV 16 E7 | NA | cbe_3787129 | LOC55828 | NA | MatrixMating/PathCalling |
| 171 | cbe_251448 | HPV 16 E7 | NA | cbe_3789063 | AP2M1 | NA | MatrixMating/PathCalling |
| 172 | cbe_251448 | HPV 16 E7 | NA | cbe_3834015 | TFPI | AT/PT | MatrixMating |
| 173 | cbe_251448 | HPV 16 E7 | NA | cbe_3921620 | MPP3 | AT | MatrixMating/PathCalling |
| 174 | cbe_251448 | HPV 16 E7 | NA | cbe_4260642 | PTPN21 | SMT | MatrixMating/PathCalling |
| 175 | cbe_251448 | HPV 16 E7 | NA | cbe_4265947 | RBP4 | AT/PT | MatrixMating |
| 176 | cbe_251448 | HPV 16 E7 | NA | cbe_4268611 | NDUFS3 | SMT | MatrixMating/PathCalling |
| 177 | cbe_251448 | HPV 16 E7 | NA | cbe_4268684 | MIZF | NA | MatrixMating/PathCalling |
| 178 | cbe_251448 | HPV 16 E7 | NA | cbe_4268740 | ZNF-U69274 | NA | MatrixMating/PathCalling |
| 179 | cbe_251448 | HPV 16 E7 | NA | cbe_4269658 | PSMC1 | NA | MatrixMating/PathCalling |
| 180 | cbe_251448 | HPV 16 E7 | NA | cbe_4269876 | SBP2 | NA | MatrixMating/PathCalling |
| 181 | cbe_251448 | HPV 16 E7 | NA | cbe_4270186 | STX4A | AT | MatrixMating/PathCalling |
| 182 | cbe_251737 | HPV 16 L2 | NA | cbe_422227 | Prey277610 | NA | PathCalling |
| 183 | cbe_251737 | HPV 16 L2 | NA | cbe_422247 | Prey277642 | NA | PathCalling |
| 184 | cbe_251737 | HPV 16 L2 | NA | cbe_3056756 | KIAA0440 | NA | MatrixMating/PathCalling |
| 185 | cbe_251737 | HPV 16 L2 | NA | cbe_3473488 | gbh_al121903 | NA | PathCalling |
| 186 | cbe_251737 | HPV 16 L2 | NA | cbe_3575702 | SUI1 | NA | PathCalling |
| 187 | cbe_251737 | HPV 16 L2 | NA | cbe_3663966 | KIAA1389 | NA | PathCalling |
| 188 | cbe_251737 | HPV 16 L2 | NA | cbe_3849002 | HSPC224 | AT | PathCalling |
| 189 | cbe_251737 | HPV 16 L2 | NA | cbe_3884811 | Hs.30289 | NA | PathCalling |
| 190 | cbe_251737 | HPV 16 L2 | NA | cbe_4268684 | MIZF | NA | MatrixMating |
| 191 | cbe_251737 | HPV 16 L2 | NA | cbe_4270335 | KIAA0276 | NA | PathCalling |
| 192 | cbe_251784 | HPV 16 L1 | NA | cbe_251790 | Prey2347 | NA | PathCalling |
| 193 | cbe_251784 | HPV 16 L1 | NA | cbe_422204 | Prey2335 | NA | PathCalling |
| 194 | cbe_251784 | HPV 16 L1 | NA | cbe_552305 | Prey2354 | NA | PathCalling |
| 195 | cbe_251784 | HPV 16 L1 | NA | cbe_967711 | Hs.201037 | NA | PathCalling |
| 196 | cbe_251784 | HPV 16 L1 | NA | cbe_1505425 | HCDI | NA | PathCalling |
| 197 | cbe_251784 | HPV 16 L1 | NA | cbe_4281271 | CRYAB | NA | PathCalling |
| 316 | cbe_2599246 | Prey1054152 | NA | cbe_3929637 | HPV 16 E5 | AT/PT | PathCalling |
| 618 | HPV 16 | BCR1 | SMT | 251445 | HPV 16 E6 | NA | MatrixMating |
| | E6422236 | | | | | | |
| 317 | cbe_2830508 | Prey142356 | NA | cbe_3929637 | HPV 16 E5 | AT/PT | PathCalling |

[0057] TABLE 4
HPV1a and HPV 11 specific interactions

| INT | cbe_SEQ CG ID | COMMON | PT/AT/ | cbe_SEQ CG ID | COMMON | PT/AT/ | |
|---|---|---|---|---|---|---|---|
| ID | Interactor A | NAME INT A | SMT/NA | Interactor B | NAME INT B | SMT/NA | |
| | | | | | | | PathCalling Screen and/or |
| | | | | | | | Matrix Assay |
| 137 | cbe_251059 | HPV 16 E1-E4 | NA | cbe_2599246 | Prey1054152 | NA | PathCalling |
| 138 | cbe_251059 | HPV 16 E1-E4 | NA | cbe_2789381 | Prey775 | NA | MatrixMating |
| 139 | cbe_251059 | HPV 16 E1-E4 | NA | cbe_3472582 | RABIF | NA | PathCalling |
| 140 | cbe_251059 | HPV 16 E1-E4 | NA | cbe_3621899 | pcnp | NA | PathCalling |
| 141 | cbe_251059 | HPV 16 E1-E4 | NA | cbe_3880186 | FLJ20343 | NA | MatrixMating/PathCalling |
| 142 | cbe_251059 | HPV 16 E1-E4 | NA | cbe_4269156 | PCDH1 | AT/PT | PathCalling |
| 143 | cbe_251059 | HPV 16 E1-E4 | NA | cbe_4269329 | SP260 | AT | PathCalling |
| 144 | cbe_251063 | HPV 16 E1 | NA | cbe_251099 | Prey802 | NA | MatrixMating/PathCalling |
| 145 | cbe_251063 | HPV 16 E1 | NA | cbe_4465094 | Prey1053092 | NA | PathCalling |
| 146 | cbe_251088 | HPV 16 E2 | NA | cbe_252041 | HPV 1a L2 | NA | MatrixMating |
| 147 | cbe_251088 | HPV 16 E2 | NA | cbe_2321057 | EFEMP1 | AT/PT | MatrixMating/PathCalling |
| 148 | cbe_251088 | HPV 16 E2 | NA | cbe_3670766 | ACTC | NA | MatrixMating/PathCalling |
| 149 | cbe_251088 | HPV 16 E2 | NA | cbe_3922906 | BSMAP | AT | PathCalling |
| 150 | cbe_251088 | HPV 16 E2 | NA | cbe_4268208 | DAD1 | AT | MatrixMating/PathCalling |
| 151 | cbe_251088 | HPV 16 E2 | NA | cbe_4279962 | DKKL1-pending | AT/PT | PathCalling |
| 159 | cbe_251445 | HPV 16 E6 | NA | cbe_2253980 | gbh_d38112_5 | NA | MatrixMating/PathCalling |
| 160 | | HPV 16 E6 | NA | cbe_2576474 | PTPN2 | AT/SMT | MatrixMating/PathCalling |
| 161 | cbe_251445 | HPV 16 E6 | NA | cbe_4269405 | gbh_af155653 | NA | MatrixMating/PathCalling |
| 162 | cbe_251445 | HPV 16 E6 | NA | cbe_4269703 | LOC51182 | NA | MatrixMating/PathCalling |
| 99 | cbe_251445 | HPV 16 E6 | NA | cbe_4270015 | RPS26 | NA | MatrixMating/PathCalling |
| 163 | cbe_251448 | HPV 16 E7 | NA | cbe_251468 | Prey1628 | NA | MatrixMating/PathCalling |
| 164 | cbe_251448 | HPV 16 E7 | NA | cbe_251502 | Prey1609 | NA | MatrixMating/PathCalling |
| 165 | cbe_251448 | HPV 16 E7 | NA | cbe_422236 | BCR1 | NA | MatrixMating/PathCalling |
| 166 | cbe_251448 | HPV 16 E7 | NA | cbe_2693325 | Prey1673 | NA | MatrixMating/PathCalling |
| 167 | cbe_251448 | HPV 16 E7 | NA | cbe_2898065 | Prey1620 | NA | MatrixMating/PathCalling |
| 168 | cbe_251448 | HPV 16 E7 | NA | cbe_3474077 | KRT4 | NA | MatrixMating |
| 169 | cbe_251448 | HPV 16 E7 | NA | cbe_3773649 | EEF1A1L14 | NA | MatrixMating/PathCalling |
| 170 | cbe_251448 | HPV 16 E7 | NA | cbe_3787129 | LOC55828 | NA | MatrixMating/PathCalling |
| 171 | cbe_251448 | HPV 16 E7 | NA | cbe_3789063 | AP2M1 | NA | MatrixMating/PathCalling |
| 172 | cbe_251448 | HPV 16 E7 | NA | cbe_3834015 | TFPI | AT/PT | MatrixMating |
| 173 | cbe_251448 | HPV 16 E7 | NA | cbe_3921620 | MPP3 | AT | MatrixMating/PathCalling |
| 174 | cbe_251448 | HPV 16 E7 | NA | cbe_4260642 | PTPN21 | SMT | MatrixMating/PathCalling |
| 175 | cbe_251448 | HPV 16 E7 | NA | cbe_4265947 | RBP4 | AT/PT | MatrixMating |
| 176 | cbe_251448 | HPV 16 E7 | NA | cbe_4268611 | NDUFS3 | SMT | MatrixMating/PathCalling |
| 177 | cbe_251448 | HPV 16 E7 | NA | cbe_4268684 | MIZF | NA | MatrixMating/PathCalling |
| 178 | cbe_251448 | HPV 16 E7 | NA | cbe_4268740 | ZNF-U69274 | NA | MatrixMating/PathCalling |
| 179 | cbe_251448 | HPV 16 E7 | NA | cbe_4269658 | PSMC1 | NA | MatrixMating/PathCalling |
| 180 | cbe_251448 | HPV 16 E7 | NA | cbe_4269876 | SBP2 | NA | MatrixMating/PathCalling |
| 181 | cbe_251448 | HPV 16 E7 | NA | cbe_4270186 | STX4A | AT | MatrixMating/PathCalling |
| 182 | cbe_251737 | HPV 16 L2 | NA | cbe_422227 | Prey277610 | NA | PathCalling |
| 183 | cbe_251737 | HPV 16 L2 | NA | cbe_422247 | Prey277642 | NA | PathCalling |
| 184 | cbe_251737 | HPV 16 L2 | NA | cbe_3056756 | KIAA0440 | NA | MatrixMating/PathCalling |
| 185 | cbe_251737 | HPV 16 L2 | NA | cbe_3473488 | gbh_al12 1903 | NA | PathCalling |
| 186 | cbe_251737 | HPV 16 L2 | NA | cbe_3575702 | SUI1 | NA | PathCalling |
| 187 | cbe_251737 | HPV 16 L2 | NA | cbe_3663966 | KIAA1389 | NA | PathCalling |
| 188 | cbe_251737 | HPV 16 L2 | NA | cbe_3849002 | HSPC224 | AT | PathCalling |
| 189 | cbe_251737 | HPV 16 L2 | NA | cbe_3884811 | Hs.30289 | NA | PathCalling |
| 190 | cbe_251737 | HPV 16 L2 | NA | cbe_4268684 | MIZF | NA | MatrixMating |
| 191 | cbe_251737 | HPV 16 L2 | NA | cbe_4270335 | KIAA0276 | NA | PathCalling |
| 192 | cbe_251784 | HPV 16 L1 | NA | cbe_251790 | Prey2347 | NA | PathCalling |
| 193 | cbe_251784 | HPV 16 L1 | NA | cbe_422204 | Prey2335 | NA | PathCalling |
| 194 | cbe_251784 | HPV 16 L1 | NA | cbe_552305 | Prey2354 | NA | PathCalling |
| 195 | cbe_251784 | HPV 16 L1 | NA | cbe_967711 | Hs.201037 | NA | PathCalling |
| 196 | cbe_251784 | HPV 16 L1 | NA | cbe_1505425 | HCDI | NA | PathCalling |
| 197 | cbe_251784 | HPV 16 L1 | NA | cbe_4281271 | CRYAB | NA | PathCalling |
| 316 | cbe_2599246 | Prey1054152 | NA | cbe_3929637 | HPV 16 E5 | AT/PT | PathCalling |
| 317 | cbe_2830508 | Prey142356 | NA | cbe_3929637 | HPV 16 E5 | AT/PT | PathCalling |
| | | | | | | | Screen/Matrix/MS |
| 137 | cbe_251059 | HPV 16 E1-E4 | NA | cbe_2599246 | Prey1054152 | NA | PathCalling |
| 138 | cbe_251059 | HPV 16 E1-E4 | NA | cbe_2789381 | Prey775 | NA | MatrixMating |
| 139 | cbe_251059 | HPV 16 E1-E4 | NA | cbe_3472582 | RABIF | NA | PathCalling |
| 140 | cbe_251059 | HPV 16 E1-E4 | NA | cbe_3621899 | pcnp | NA | PathCalling |
| 141 | cbe_251059 | HPV 16 E1-E4 | NA | cbe_3880186 | FLJ20343 | NA | MatrixMating/PathCalling |
| 142 | cbe_251059 | HPV 16 E1-E4 | NA | cbe_4269156 | PCDH1 | AT/PT | PathCalling |
| 143 | cbe_251059 | HPV 16 E1-E4 | NA | cbe_4269329 | SP260 | AT | PathCalling |

[0058] TABLE 5
HPV1a and HPV 16 specific interactions

| INT | cbe_SEQ ID | COMMON | PT/AT/ | cbe_SEQ ID | COMMON | | PathCalling Screen and/or |
|---|---|---|---|---|---|---|---|
| ID | Interactor A | NAME INT A | SMT/NA | Interactor B | NAME INT B | PT/AT/SMT/NA | Matrix Assay |
| 137 | cbe_251059 | HPV 16 E1-E4 | NA | cbe_2599246 | Prey1054152 | NA | PathCalling |
| 138 | cbe_251059 | HPV 16 E1-E4 | NA | cbe_2789381 | Prey775 | NA | MatrixMating |
| 139 | cbe_251059 | HPV 16 E1-E4 | NA | cbe_3472582 | RABIF | NA | PathCalling |
| 140 | cbe_251059 | HPV 16 E1-E4 | NA | cbe_3621899 | pcnp | NA | PathCalling |
| 141 | cbe_251059 | HPV 16 E1-E4 | NA | cbe_3880186 | FLJ20343 | NA | MatrixMating/PathCalling |
| 142 | cbe_251059 | HPV 16 E1-E4 | NA | cbe_4269156 | PCDH1 | AT/PT | PathCalling |
| 143 | cbe_251059 | HPV 16 E1-E4 | NA | cbe_4269329 | SP260 | AT | PathCalling |
| 144 | cbe_251063 | HPV 16 E1 | NA | cbe_251099 | Prey802 | NA | MatrixMating/PathCalling |
| 145 | cbe_251063 | HPV 16 E1 | NA | cbe_4465094 | Prey1053092 | NA | PathCalling |
| 146 | cbe_251088 | HPV 16 E2 | NA | cbe_252041 | HPV 1a L2 | NA | MatrixMating |
| 147 | cbe_251088 | HPV 16 E2 | NA | cbe_2321057 | EFEMP1 | AT/PT | MatrixMating/PathCalling |
| 148 | cbe_251088 | HPV 16 E2 | NA | cbe_3670766 | ACTC | NA | MatrixMating/PathCalling |
| 149 | cbe_251088 | HPV 16 E2 | NA | cbe_3922906 | BSMAP | AT | PathCalling |
| 150 | cbe_251088 | HPV 16 E2 | NA | cbe_4268208 | DAD1 | AT | MatrixMating/PathCalling |
| 151 | cbe_251088 | HPV 16 E2 | NA | cbe_4279962 | DKKL1-pending | AT/PT | PathCalling |
| 159 | cbe_251445 | HPV 16 E6 | NA | cbe_2253980 | gbh_d38112_5 | NA | MatrixMating/PathCalling |
| 160 | cbe_251445 | HPV 16 E6 | NA | cbe_2576474 | PTPN2 | AT/SMT | MatrixMating/PathCalling |
| 161 | cbe_251445 | HPV 16 E6 | NA | cbe_4269405 | gbh_af155653 | NA | MatrixMating/PathCalling |
| 162 | cbe_251445 | HPV 16 E6 | NA | cbe_4269703 | LOC51182 | NA | MatrixMating/PathCalling |
| 99 | cbe_251445 | HPV 16 E6 | NA | cbe_4270015 | RPS26 | NA | MatrixMating/PathCalling |
| 163 | cbe_251448 | HPV 16 E7 | NA | cbe_251468 | Prey1628 | NA | MatrixMating/PathCalling |
| 164 | cbe_251448 | HPV 16 E7 | NA | cbe_251502 | Prey1609 | NA | MatrixMating/PathCalling |
| 165 | cbe_251448 | HPV 16 E7 | NA | cbe_422236 | BCR1 | NA | MatrixMating/PathCalling |
| 166 | cbe_251448 | HPV 16 E7 | NA | cbe_2693325 | Prey1673 | NA | MatrixMating/PathCalling |
| 167 | cbe_251448 | HPV 16 E7 | NA | cbe_2898065 | Prey1620 | NA | MatrixMating/PathCalling |
| 168 | cbe_251448 | HPV 16 E7 | NA | cbe_3474077 | KRT4 | NA | MatrixMating |
| 169 | cbe_251448 | HPV 16 E7 | NA | cbe_3773649 | EEF1A1L14 | NA | MatrixMating/PathCalling |
| 170 | cbe_251448 | HPV 16 E7 | NA | cbe_3787129 | LOC55828 | NA | MatrixMating/PathCalling |
| 171 | cbe_251448 | HPV 16 E7 | NA | cbe_3789063 | AP2M1 | NA | MatrixMating/PathCalling |
| 172 | cbe_251448 | HPV 16 E7 | NA | cbe_3834015 | TFPI | AT/PT | MatrixMating |
| 173 | cbe_251448 | HPV 16 E7 | NA | cbe_3921620 | MPP3 | AT | MatrixMating/PathCalling |
| 174 | cbe_251448 | HPV 16 E7 | NA | cbe_4260642 | PTPN21 | SMT | MatrixMating/PathCalling |
| 175 | cbe_251448 | HPV 16 E7 | NA | cbe_4265947 | RBP4 | AT/PT | MatrixMating |
| 176 | cbe_251448 | HPV 16 E7 | NA | cbe_4268611 | NDUFS3 | SMT | MatrixMating/PathCalling |
| 177 | cbe_251448 | HPV 16 E7 | NA | cbe_4268684 | MIZF | NA | MatrixMating/PathCalling |
| 178 | cbe_251448 | HPV 16 E7 | NA | cbe_4268740 | ZNF-U69274 | NA | MatrixMating/PathCalling |
| 179 | cbe_251448 | HPV 16 E7 | NA | cbe_4269658 | PSMC1 | NA | MatrixMating/PathCalling |
| 180 | cbe_251448 | HPV 16 E7 | NA | cbe_4269876 | SBP2 | NA | MatrixMating/PathCalling |
| 181 | cbe_251448 | HPV 16 E7 | NA | cbe_4270186 | STX4A | AT | MatrixMating/PathCalling |
| 383 | cbe_1710 | QP-C | NA | cbe_251917 | HPV 1a E2 | NA | PathCalling |
| 410 | cbe_251917 | HPV 1a E2 | NA | cbe_251976 | Prey2777 | NA | MatrixMating/PathCalling |
| 411 | cbe_251917 | HPV 1a E2 | NA | cbe_1469980 | FLJ20259 | NA | MatrixMating/PathCalling |
| 412 | cbe_251917 | HPV 1a E2 | NA | cbe_2826346 | RPS10 | NA | PathCalling |
| 413 | cbe_251917 | HPV 1a E2 | NA | cbe_2830508 | Prey142356 | NA | PathCalling |
| 414 | cbe_251917 | HPV 1a E2 | NA | cbe_3345510 | COX6C | SMT | PathCalling |
| 415 | cbe_251917 | HPV 1a E2 | NA | cbe_3583511 | MGC3222 | NA | PathCalling |
| 416 | cbe_251917 | HPV 1a E2 | NA | cbe_3625721 | EIF2B2 | NA | PathCalling |
| 417 | cbe_251917 | HPV 1a E2 | NA | cbe_3641816 | ANKH | NA | PathCalling |
| 418 | cbe_251917 | HPV 1a E2 | NA | cbe_3826540 | Hs.98226 | NA | MatrixMating/PathCalling |
| 419 | cbe_251917 | HPV 1a E2 | NA | cbe_4268532 | Prey1053593 | NA | PathCalling |
| 420 | cbe_251917 | HPV 1a E2 | NA | cbe_4269834 | GNB2L1 | NA | MatrixMating/PathCalling |
| 421 | cbe_251917 | HPV 1a E2 | NA | cbe_4270118 | Hs.211143 | NA | PathCalling |
| 441 | cbe_252041 | HPV 1a L2 | NA | cbe_252090 | Prey2820 | NA | MatrixMating |
| 442 | cbe_252041 | HPV 1a L2 | NA | cbe_2321045 | WNT2B | NA | PathCalling |
| 443 | cbe_252041 | HPV 1a L2 | NA | cbe_2603140 | Prey146 | NA | MatrixMating/PathCalling |
| 444 | cbe_252041 | HPV 1a L2 | NA | cbe_3222359 | LOC51748 | NA | PathCalling |
| 445 | cbe_252041 | HPV 1a L2 | NA | cbe_3456824 | gbh_l20086 | AT | PathCalling |
| 446 | cbe_252041 | HPV 1a L2 | NA | cbe_3606990 | Prey1053670 | NA | PathCalling |
| 447 | cbe_252041 | HPV 1a L2 | NA | cbe_3770440 | gbh_af217505 | NA | MatrixMating/PathCalling |
| 448 | cbe_252041 | HPV 1a L2 | NA | cbe_3810791 | EPHB1 | NA | MatrixMating/PathCalling |
| 449 | cbe_252041 | HPV 1a L2 | NA | cbe_4248793 | GSN | AT/PT | PathCalling |
| 450 | cbe_252041 | HPV 1a L2 | NA | cbe_4268470 | HSPE1 | NA | MatrixMating/PathCalling |
| 451 | cbe_252041 | HPV 1a L2 | NA | cbe_4269628 | RIL | NA | MatrixMating |
| 452 | cbe_252041 | HPV 1a L2 | NA | cbe_4540466 | PUM1 | NA | MatrixMating/PathCalling |
| 576 | cbe_252090 | Prey2820 | NA | cbe_552975 | HPV 1a E1 | NA | MatrixMating |
| 579 | cbe_71919 | FLJ13236 | NA | cbe_552975 | HPV 1a E1 | NA | PathCalling |
| 580 | cbe_251071 | Prey734 | NA | cbe_552975 | HPV 1a E1 | NA | MatrixMating |
| 581 | cbe_552975 | HPV 1a E1 | NA | cbe_3001381 | IRF1 | NA | MatrixMating |
| 582 | cbe_552975 | HPV 1a E1 | NA | cbe_3340492 | TRIP | NA | MatrixMating |
| 583 | cbe_552975 | HPV 1a E1 | NA | cbe_3926508 | TDE1 | AT | PathCalling |
| 584 | cbe_552975 | HPV 1a E1 | NA | cbe_4269167 | TLK2 | SMT | MatrixMating |
| 585 | cbe_552975 | HPV 1a E1 | NA | cbe_4269681 | Hs.224712 | NA | MatrixMating |
| 586 | cbe_552975 | HPV 1a E1 | NA | cbe_4269703 | LOC51182 | NA | MatrixMating |
| 587 | cbe_552975 | HPV 1a E1 | NA | cbe_4269931 | NDUFAB1 | SMT | MatrixMating |
| 280 | cbe_2585091 | SLC5A6 | AT/SMT | cbe_3929637 | HPV 16 E5 | AT/PT | MatrixMating/PathCalling |
| 431 | cbe_251925 | HPV 1a E7 | NA | cbe_3810032 | gbh_af142421 | NA | MatrixMating/PathCalling |
| 316 | cbe_2599246 | Prey1054152 | NA | cbe_3929637 | HPV 16 E5 | AT/PT | PathCalling |
| 317 | cbe_2830508 | Prey142356 | NA | cbe_3929637 | HPV 16 E5 | AT/PT | PathCalling |

[0059] TABLE 6
HPV 11, and HPV 16 specific interactions

| | cbe_SEQ ID | COMMON | PT/AT/ | cbe_SEQ ID | COMMON | | PathCalling Screen and/or |
|---|---|---|---|---|---|---|---|
| INT ID | Interactor A | NAME INT A | SMT/NA | Interactor B | NAME INT B | PT/AT/SMT/NA | Matrix Assay |
| 34 | cbe_250834 | HPV 11 E7 | NA | cbe_250878 | Prey302 | NA | MatrixMating/PathCalling |
| 35 | cbe_250834 | HPV 11 E7 | NA | cbe_250883 | Prey244 | NA | MatrixMating/PathCalling |
| 36 | cbe_250834 | HPV 11 E7 | NA | cbe_250888 | Prey228 | NA | MatrixMating/PathCalling |
| 37 | cbe_250834 | HPV 11 E7 | NA | cbe_3056756 | KIAA0440 | NA | MatrixMating/PathCalling |
| 38 | cbe_250834 | HPV 11 E7 | NA | cbe_3454406 | gbh_af252829 | NA | MatrixMating/PathCalling |
| 39 | cbe_250834 | HPV 11 E7 | NA | cbe_3760926 | gbh_al359334 | NA | MatrixMating/PathCalling |
| 40 | cbe_250834 | HPV 11 E7 | NA | cbe_3845697 | Hs.191063 | NA | MatrixMating/PathCalling |
| 41 | cbe_250834 | HPV 11 E7 | NA | cbe_4260642 | PTPN21 | SMT | MatrixMating/PathCalling |
| 42 | cbe_250834 | HPV 11 E7 | NA | cbe_4265947 | RBP4 | AT/PT | MatrixMating/PathCalling |
| 43 | cbe_250834 | HPV 11 E7 | NA | cbe_4268935 | RPL26 | NA | MatrixMating/PathCalling |
| 44 | cbe_250834 | HPV 11 E7 | NA | cbe_4269451 | gbh_af038189 | NA | MatrixMating/PathCalling |
| 45 | cbe_250834 | HPV 11 E7 | NA | cbe_4269681 | Hs.224712 | NA | MatrixMating/PathCalling |
| 46 | cbe_250834 | HPV 11 E7 | NA | cbe_4269818 | Hs.73680 | NA | MatrixMating/PathCalling |
| 47 | cbe_250834 | HPV 11 E7 | NA | cbe_4270015 | RPS26 | NA | MatrixMating/PathCalling |
| 48 | cbe_250834 | HPV 11 E7 | NA | cbe_4270441 | Prey1052970 | NA | PathCalling |
| 49 | cbe_250834 | HPV 11 E7 | NA | cbe_4280774 | ITGB4 | AT/PT | MatrixMating/PathCalling |
| 159 | cbe_251445 | HPV 16 E6 | NA | cbe_2253980 | gbh_d38112_5 | NA | MatrixMating/PathCalling |
| 160 | cbe_251445 | HPV 16 E6 | NA | cbe_2576474 | PTPN2 | AT/SMT | MatrixMating/PathCalling |
| 161 | cbe_251445 | HPV 16 E6 | NA | cbe_4269405 | gbh_af155653 | NA | MatrixMating/PathCalling |
| 162 | cbe_251445 | HPV 16 E6 | NA | cbe_4269703 | LOC51182 | NA | MatrixMating/PathCalling |
| 99 | cbe_251445 | HPV 16 E6 | NA | cbe_4270015 | RPS26 | NA | MatrixMating/PathCalling |
| 163 | cbe_251448 | HPV 16 E7 | NA | cbe_251468 | Prey1628 | NA | MatrixMating/PathCalling |
| 164 | cbe_251448 | HPV 16 E7 | NA | cbe_251502 | Prey1609 | NA | MatrixMating/PathCalling |
| 165 | cbe_251448 | HPV 16 E7 | NA | cbe_422236 | BCR1 | NA | MatrixMating/PathCalling |
| 166 | cbe_251448 | HPV 16 E7 | NA | cbe_2693325 | Prey1673 | NA | MatrixMating/PathCalling |
| 167 | cbe_251448 | HPV 16 E7 | NA | cbe_2898065 | Prey1620 | NA | MatrixMating/PathCalling |
| 168 | cbe_251448 | HPV 16 E7 | NA | cbe_3474077 | KRT4 | NA | MatrixMating |
| 169 | cbe_251448 | HPV 16 E7 | NA | cbe_3773649 | EEF1A1L14 | NA | MatrixMating/PathCalling |
| 170 | cbe_251448 | HPV 16 E7 | NA | cbe_3787129 | LOC55828 | NA | MatrixMating/PathCalling |
| 171 | cbe_251448 | HPV 16 E7 | NA | cbe_3789063 | AP2M1 | NA | MatrixMating/PathCalling |
| 172 | cbe_251448 | HPV 16 E7 | NA | cbe_3834015 | TFPI | AT/PT | MatrixMating |
| 173 | cbe_251448 | HPV 16 E7 | NA | cbe_3921620 | MPP3 | AT | MatrixMating/PathCalling |
| 174 | cbe_251448 | HPV 16 E7 | NA | cbe_4260642 | PTPN21 | SMT | MatrixMating/PathCalling |
| 175 | cbe_251448 | HPV 16 E7 | NA | cbe_4265947 | RBP4 | AT/PT | MatrixMating |
| 176 | cbe_251448 | HPV 16 E7 | NA | cbe_4268611 | NDUFS3 | SMT | MatrixMating/PathCalling |
| 177 | cbe_251448 | HPV 16 E7 | NA | cbe_4268684 | MIZF | NA | MatrixMating/PathCalling |
| 178 | cbe_251448 | HPV 16 E7 | NA | cbe_4268740 | ZNF-U69274 | NA | MatrixMating/PathCalling |
| 179 | cbe_251448 | HPV 16 E7 | NA | cbe_4269658 | PSMC1 | NA | MatrixMating/PathCalling |
| 180 | cbe_251448 | HPV 16 E7 | NA | cbe_4269876 | SBP2 | NA | MatrixMating/PathCalling |
| 181 | cbe_251448 | HPV 16 E7 | NA | cbe_4270186 | STX4A | AT | MatrixMating/PathCalling |
| 182 | cbe_251737 | HPV 16 L2 | NA | cbe_422227 | Prey277610 | NA | PathCalling |
| 183 | cbe_251737 | HPV 16 L2 | NA | cbe_422247 | Prey277642 | NA | PathCalling |
| 184 | cbe_251737 | HPV 16 L2 | NA | cbe_3056756 | KIAA0440 | NA | MatrixMating/PathCalling |
| 185 | cbe_251737 | HPV 16 L2 | NA | cbe_3473488 | gbh_al121903 | NA | PathCalling |
| 186 | cbe_251737 | HPV 16 L2 | NA | cbe_3575702 | SUI1 | NA | PathCalling |
| 187 | cbe_251737 | HPV 16 L2 | NA | cbe_3663966 | KIAA1389 | NA | PathCalling |
| 188 | cbe_251737 | HPV 16 L2 | NA | cbe_3849002 | HSPC224 | AT | PathCalling |
| 189 | cbe_251737 | HPV 16 L2 | NA | cbe_3884811 | Hs.30289 | NA | PathCalling |
| 190 | cbe_251737 | HPV 16 L2 | NA | cbe_4268684 | MIZF | NA | MatrixMating |
| 191 | cbe_251737 | HPV 16 L2 | NA | cbe_4270335 | KIAA0276 | NA | PathCalling |

[0060] TABLE 7
HPV1a, HPV 11, and HPV 16 specific interactions

| INT | cbe_SEQ ID | COMMON | | cbe_SEQ ID | COMMON | | PathCalling Screen and/or |
|---|---|---|---|---|---|---|---|
| ID | Interactor A | NAME INT A | PT/AT/SMT/NA | Interactor B | NAME INT B | PT/AT/SMT/NA | Matrix Assay |
| 34 | cbe_250834 | HPV 11 E7 | NA | cbe_250878 | Prey302 | NA | MatrixMating/PathCalling |
| 35 | cbe_250834 | HPV 11 E7 | NA | cbe_250883 | Prey244 | NA | MatrixMating/PathCalling |
| 36 | cbe_250834 | HPV 11 E7 | NA | cbe_250888 | Prey228 | NA | MatrixMating/PathCalling |
| 37 | cbe_250834 | HPV 11 E7 | NA | cbe_3056756 | KIAA0440 | NA | MatrixMating/PathCalling |
| 38 | cbe_250834 | HPV 11 E7 | NA | cbe_3454406 | gbh_af252829 | NA | MatrixMating/PathCalling |
| 39 | cbe_250834 | HPV 11 E7 | NA | cbe_3760926 | gbh_al359334 | NA | MatrixMating/PathCalling |
| 40 | cbe_250834 | HPV 11 E7 | NA | cbe_3845697 | Hs.191063 | NA | MatrixMating/PathCalling |
| 41 | cbe_250834 | HPV 11 E7 | NA | cbe_4260642 | PTPN21 | SMT | MatrixMating/PathCalling |
| 42 | cbe_250834 | HPV 11 E7 | NA | cbe_4265947 | RBP4 | AT/PT | MatrixMating/PathCalling |
| 43 | cbe_250834 | HPV 11 E7 | NA | cbe_4268935 | RPL26 | NA | MatrixMating/PathCalling |
| 44 | cbe_250834 | HPV 11 E7 | NA | cbe_4269451 | gbh_af038189 | NA | MatrixMating/PathCalling |
| 45 | cbe_250834 | HPV 11 E7 | NA | cbe_4269681 | Hs.224712 | NA | MatrixMating/PathCalling |
| 46 | cbe_250834 | HPV 11 E7 | NA | cbe_4269818 | Hs.73680 | NA | MatrixMating/PathCalling |
| 47 | cbe_250834 | HPV 11 E7 | NA | cbe_4270015 | RPS26 | NA | MatrixMating/PathCalling |
| 48 | cbe_250834 | HPV 11 E7 | NA | cbe_4270441 | Prey1052970 | NA | PathCalling |
| 49 | cbe_250834 | HPV 11 E7 | NA | cbe_4280774 | ITGB4 | AT/PT | MatrixMating/PathCalling |
| 163 | cbe_251448 | HPV 16 E7 | NA | cbe_251468 | Prey1628 | NA | MatrixMating/PathCalling |
| 164 | cbe_251448 | HPV 16 E7 | NA | cbe_251502 | Prey1609 | NA | MatrixMating/PathCalling |
| 165 | cbe_251448 | HPV 16 E7 | NA | cbe_422236 | BCR1 | NA | MatrixMating/PathCalling |
| 166 | cbe_251448 | HPV 16 E7 | NA | cbe_2693325 | Prey1673 | NA | MatrixMating/PathCalling |
| 167 | cbe_251448 | HPV 16 E7 | NA | cbe_2898065 | Prey1620 | NA | MatrixMating/PathCalling |
| 168 | cbe_251448 | HPV 16 E7 | NA | cbe_3474077 | KRT4 | NA | MatrixMating |
| 169 | cbe_251448 | HPV 16 E7 | NA | cbe_3773649 | EEF1A1L14 | NA | MatrixMating/PathCalling |
| 170 | cbe_251448 | HPV 16 E7 | NA | cbe_3787129 | LOC55828 | NA | MatrixMating/PathCalling |
| 171 | cbe_251448 | HPV 16 E7 | NA | cbe_3789063 | AP2M1 | NA | MatrixMating/PathCalling |
| 172 | cbe_251448 | HPV 16 E7 | NA | cbe_3834015 | TFPI | AT/PT | MatrixMating |
| 173 | cbe_251448 | HPV 16 E7 | NA | cbe_3921620 | MPP3 | AT | MatrixMating/PathCalling |
| 174 | cbe_251448 | HPV 16 E7 | NA | cbe_4260642 | PTPN21 | SMT | MatrixMating/PathCalling |
| 175 | cbe_251448 | HPV 16 E7 | NA | cbe_4265947 | RBP4 | AT/PT | MatrixMating |
| 176 | cbe_251448 | HPV 16 E7 | NA | cbe_4268611 | NDUFS3 | SMT | MatrixMating/PathCalling |
| 177 | cbe_251448 | HPV 16 E7 | NA | cbe_4268684 | MIZF | NA | MatrixMating/PathCalling |
| 178 | cbe_251448 | HPV 16 E7 | NA | cbe_4268740 | ZNF-U69274 | NA | MatrixMating/PathCalling |
| 179 | cbe_251448 | HPV 16 E7 | NA | cbe_4269658 | PSMC1 | NA | MatrixMating/PathCalling |
| 180 | cbe_251448 | HPV 16 E7 | NA | cbe_4269876 | SBP2 | NA | MatrixMating/PathCalling |
| 181 | cbe_251448 | HPV 16 E7 | NA | cbe_4270186 | STX4A | AT | MatrixMating/PathCalling |
| 427 | cbe_251925 | HPV 1a E7 | NA | cbe_251953 | Prey2724 | NA | MatrixMating/PathCalling |
| 428 | cbe_251925 | HPV 1a E7 | NA | cbe_3753270 | gbh_ac004503 | NA | MatrixMating/PathCalling |
| 429 | cbe_251925 | HPV 1a E7 | NA | cbe_3760926 | gbh_al359334 | NA | MatrixMating/PathCalling |
| 430 | cbe_251925 | HPV 1a E7 | NA | cbe_3789063 | AP2M1 | NA | MatrixMating |
| 431 | cbe_251925 | HPV 1a E7 | NA | cbe_3810032 | gbh_af142421 | NA | MatrixMating/PathCalling |
| 432 | cbe_251925 | HPV 1a E7 | NA | cbe_3820530 | PGAM1 | SMT | MatrixMating/PathCalling |
| 309 | cbe_251925 | HPV 1a E7 | NA | cbe_3834015 | TFPI | AT/PT | MatrixMating |
| 433 | cbe_251925 | HPV 1a E7 | NA | cbe_4265947 | RBP4 | AT/PT | MatrixMating/PathCalling |
| 434 | cbe_251925 | HPV 1a E7 | NA | cbe_4267526 | HRIHFB2206 | NA | MatrixMating/PathCalling |

[0061] In certain embodiments, the first polypeptide is labeled. In other embodiments, the second polypeptide is labeled, while in some embodiments, both the first and second polypeptides are labeled. Labeling can be performed using any art-recognized method for labeling polypeptides. Examples of detectable substances include various enzymes, prosthetic groups, fluorescent materials, luminescent materials, bioluminescent materials, and radioactive materials. Examples of suitable enzymes include horseradish peroxidase, alkaline phosphatase, β-galactosidase, or acetylcholinesterase; examples of suitable prosthetic group complexes include streptavidin/biotin and avidin/biotin; examples of suitable fluorescent materials include umbelliferone, fluorescein, fluorescein isothiocyanate, rhodamine, dichlorotriazinylamine fluorescein, dansyl chloride or phycoerythrin; an example of a luminescent material includes luminol; examples of bioluminescent materials include luciferase, luciferin, and aequorin, and examples of suitable radioactive material include ¹²⁵I, ¹³¹I, ³⁵S or ³H.

[0062] The invention also includes complexes of two or more polypeptides in which at least one of the polypeptides is present as a fragment of a complex-forming polypeptide according to the invention. For example, one or more polypeptides may include an amino acid sequence sufficient to bind to its corresponding polypeptde. A binding domain of a given first polypeptide can be any number of amino acids sufficient to specifically bind to, and complex with, the corresponding second polypeptide under conditions suitable for complex formation. The binding domain can be the minimal number of amino acids required to retain binding affinity, or may be a larger fragment or derivative of the polypeptides listed in Tables 1 through 7, columns 2 and 5.

[0063] Procedures for identifying binding domains can be readily identified by one of ordinary skill in the art including the procedures described herein. For example, nucleic acid sequences containing various portions of a “bait” protein can be tested in a yeast two hybrid screening assay in combination with a nucleic acid encoding the corresponding “prey” protein.

[0064] In certain embodiments, the “bait” polypeptide of the complex are HPV derived proteins L1, L2, E2, E4, E5, E6 and E7. In some embodiments the “prey” protein of the complex are identified as cellular proliferation and transformation proteins, proteins involved in protein synthesis, folding or turnover and vesicle trafficking molecules when screened against several human prey libraries.

[0065] In other embodiments, the complexes are human ortholog complexes, chimeric complexes, or specific complexes implicated in fungal pathways, as discussed in detail below.

[0066] Polypeptides forming the complexes according to the invention can be made using techniques known in the art. For example, one or more of the polypeptides in the complex can be chemically synthesized using art-recognized methods for polypeptide synthesis. These methods are common in the art, including synthesis using a peptide synthesizer. See, e.g., Peptide Chemistry, A Practical Textbook, Bodasnsky, Ed. Springer-Verlag, 1988; Merrifield, Science 232: 241-247 (1986); Barany, et al, Intl. J. Peptide Protein Res. 30: 705-739 (1987); Kent, Ann. Rev. Biochem. 57:957-989 (1988), and Kaiser, et al, Science 243: 187-198 (1989).

[0067] Alternatively, polypeptides can be made by expressing one or both polypeptides from a nucleic acid and allowing the complex to form from the expressed polypeptides. Any known nucleic acids that express the polypeptides, whether yeast or human (or chimerics of these polypeptides) can be used, as can vectors and cells expressing these polypeptides. Sequences of yeast ORFs and human polypeptides as referenced in Tables 3 and 7 are publicly available, e.g. at the Saccharomyces Genome Database (SGD) and GenBank (see, e.g. Hudson et al., Genome Res. 7: 1169-1173 (1997). If desired, the complexes can then be recovered and isolated.

[0068] Recombinant cells expressing the polypeptide, or a fragment or derivative thereof, may be obtained using methods known in the art, and individual gene product or complex may be isolated and analyzed (See, e.g., e.g., as described in Sambrook et al., eds., MOLECULAR CLONING: A LABORATORY MANUAL, 2nd Ed., Cold Spring Harbor Laboratory Press, Cold Spring Harbor, N.Y., 1989; and Ausubel, et al., eds., CURRENT PROTOCOLS IN MOLECULAR BIOLOGY, John Wiley & Sons, New York, N.Y., 1993). This is achieved by assays that are based upon the physical and/or functional properties of the protein or complex. The assays can include, e.g., radioactive labeling of one or more of the polypeptide complex components, followed by analysis by gel electrophoresis, immunoassay, cross-linking to marker-labeled products. Polypeptide complex may be isolated and purified by standard methods known in the art (either from natural sources or recombinant host cells expressing the proteins/protein complex). These methods can include, e.g., column chromatography (e.g., ion exchange, affinity, gel exclusion, reverse-phase, high pressure, fast protein liquid, etc), differential centrifugation, differential solubility, or similar methods used for the purification of proteins.

[0069] Combinatorial libraries recognized in the art may be used to provide “prey” proteins. In a preferred embodiment, a keratinocyte library, one of the cell types from tissues normally infected by HPV strains is disclosed.

Complexes Useful for Identifying HPV Infection

[0070] The invention further provides complexes of polypeptides useful, inter alia, in identifying agents that inhibit viral proliferation and cell proliferation leading to cancer.

[0071] There have been recent breakthroughs in vaccine and immunotherapy for HPV infection (Koutsky, Ault et al. 2002), these therapeutic modes are still under investigation. If these, or other new modalities of therapy prove to be successful in treating HPV infection, it will be necessary to stage and monitor the progression of HPV-induced disease and the course of treatment. The tools described herein are certain to have utility for assessing the stage of disease and the success of treatment.

[0072] Protein interactions which are useful for identifying HPV infection are considered below.

[0073] Protein interactions that are unique to HPV 1a may be used, for example, in a diagnostic embodiment to determine if an infection by HPV is of a potentially cancer causing nature or not. An interaction that is unique to HPV 1a indicates that the infection is not of a kind that is known to cause cancer or cervical lesions. In one embodiment, an ELISA assay that uses an antibody against one of the non-viral proteins indicated in Tables 1 through 7 as a first antibody and an antibody specific for a virally encoded protein may be used to determine if an infection is actively producing viral protein. Those interactions (indicated “INT ID”) that correspond to the interaction between a protein encoded by the nucleotide sequence indicated by a SEQ ID for Interactor A (“SEQ ID INT A”) with the protein encoded by the nucleic acid represented by a SEQ ID for Interactor B (“SEQ ID INT B”), one or both of which may have a common name (indicated “COMMON NAME INT A”; “COMMON NAME INT B”) one or both of which may have utility as a protein therapeutic (PT), antibody target (AT), or a small molecule target (SMT), and/or may have a therapeutic utility for in indication that may or may not directly involve the interaction of HPV1a, HPV11, HPV16, a combination of the these viruses, or members of the family of viruses they represent (those that cause warts, non-cancerous lesions, or cancerous lesions of the anal-genital tract, and/or head/neck/oral cancers or the non-cancerous versions of the same and the like)(NA). In all cases the interactions have application in the diagnosis of any HPV infections and conditions induced by such infections, active or latent.

[0074] Interactions with any one or more PT, AT, SMT, and/or NA for which there exists or may be developed a molecule that therapeutically affects any one or more of the indicated proteins in an interaction with one or more HPV proteins of the strains listed or family members of such viruses may be used as a therapeutic agent for the treatment of HPV infections and/or the conditions caused directly or indirectly by HPV infection.

Chimeric Polypeptides, DNA, Vectors and Recombinant Cells

[0075] In a further aspect, the invention provides a chimeric polypeptide that includes sequences of two interacting proteins according to the invention. The interacting proteins can be, e.g., the interacting protein pairs disclosed in Tables 1-7, herein. Also included are chimeric polypeptides including multimers, i.e., sequences from two or more pairs of interacting proteins. An example of such a chimeric polypeptide is a polypeptide that includes amino acid sequences from INT A and INT B, and from INT ID Interactor A and INT ID Interactor B. The chimeric polypeptide includes a region of a first protein covalently linked, e.g. via peptide bond, to a region of a second protein.

[0076] In some embodiments, the chimeric polypeptide(s) of the complex include(s) six or more amino acids of a first protein covalently linked to six or more amino acids of a second protein. In other embodiments, the chimeric polypeptide includes at least one binding domain of a first or second protein.

[0077] Preferably, the chimeric polypeptide includes a region of amino acids of the first polypeptide able to bind to a second polypeptide. Alternatively, or in addition, the chimeric polypeptide includes a region of amino acids of the second polypeptide able to bind to the first polypeptide.

[0078] Nucleic acid encoding the chimeric polypeptide, as well as vectors and cells containing these nucleic acids, are within the scope of the present invention. The chimeric polypeptides can be constructed by expressing nucleic acids encoding chimeric polypeptides using recombinant methods, described above, then recovering the chimeric polypeptides, or by chemically synthesizing the chimeric polypeptides. Host-vector systems that can be used to express chimeric polypeptides include, e.g.: (i) mammalian cell systems which are infected with vaccinia virus, adenovirus; (ii) insect cell systems infected with baculovirus; (iii) yeast containing yeast vectors or (iv) bacteria transformed with bacteriophage, DNA, plasmid DNA, or cosmid DNA. Depending upon the host-vector system utilized, any one of a number of suitable transcription and translation elements may be used.

[0079] The expression of the specific proteins may be controlled by any promoter/enhancer known in the art including, e.g.: (i) the SV40 early promoter (see e.g., Bernoist & Chambon, Nature 290: 304-310 (1981)); (ii) the promoter contained within the 3′-terminus long terminal repeat of Rous Sarcoma Virus (see e.g., Yamamoto, et al., Cell 22: 787-797 (1980)); (iii) the Herpesvirus thymidine kinase promoter (see e.g., Wagner, et al., Proc. Natl. Acad. Sci. USA 78: 1441-1445 (1981)); (iv) the regulatory sequences of the metallothionein gene (see e.g., Brinster, et al., Nature 296: 39-42 (1982)); (v) prokaryotic expression vectors such as the p-lactamase promoter (see e.g., Villa-Kamaroff, et al., Proc. Natl. Acad. Sci. USA 75: 3727-3731 (1978)); (vi) the tac promoter (see e.g., DeBoer, et al., Proc. Natl. Acad. Sci. USA 80: 21-25 (1983)).

[0080] Plant promoter/enhancer sequences within plant expression vectors may also be utilized including, e.g.: (i) the nopaline synthetase promoter (see e.g., Herrar-Estrella, et al., Nature 303: 209-213 (1984)); (ii) the cauliflower mosaic virus 35S RNA promoter (see e.g., Garder, et al., Nuc. Acids Res. 9: 2871 (1981)) and (iii) the promoter of the photosynthetic enzyme ribulose bisphosphate carboxylase (see e.g., Herrera-Estrella, et al., Nature 310: 115-120 (1984)).

[0081] Promoter/enhancer elements from yeast and other fungi (e.g., the Gal4 promoter, the alcohol dehydrogenase promoter, the phosphoglycerol kinase promoter, the alkaline phosphatase promoter), as well as the following animal transcriptional control regions, which possess tissue specificity and have been used in transgenic animals, may be utilized in the production of proteins of the present invention.

[0082] Other animal transcriptional control sequences derived from animals include, e.g.: (i) the insulin gene control region active within pancreatic β-cells (see e.g., Hanahan, et al., Nature 315: 115-122 (1985)); (ii) the immunoglobulin gene control region active within lymphoid cells (see e.g., Grosschedl, et al., Cell 38: 647-658 (1984)); (iii) the albumin gene control region active within liver (see e.g., Pinckert, et al., Genes and Devel. 1: 268-276 (1987)); (iv) the myelin basic protein gene control region active within brain oligodendrocyte cells (see e.g., Readhead, et al., Cell 48: 703-712 (1987)); and (v) the gonadotrophin-releasing hormone gene control region active within the hypothalamus (see e.g., Mason, et al., Science 234: 1372-1378 (1986)).

[0083] The vector may include a promoter operably-linked to nucleic acid sequences which encode a chimeric polypeptide, one or more origins of replication, and optionally, one or more selectable markers (e.g., an antibiotic resistance gene). A host cell strain may be selected which modulates the expression of chimeric sequences, or modifies/processes the expressed proteins in a desired manner. Moreover, different host cells possess characteristic and specific mechanisms for the translational and post-translational processing and modification (e.g., glycosylation, phosphorylation, and the like) of expressed proteins. Appropriate cell lines or host systems may thus be chosen to ensure the desired modification and processing of the foreign protein is achieved. For example, protein expression within a bacterial system can be used to produce an unglycosylated core protein; whereas expression within mammalian cells ensures “native” glycosylation of a heterologous protein.

Antibodies Specific for Polypeptide Complexes

[0084] The invention further provides antibodies and antibody fragments (such as Fab or (Fab)₂ fragments) that bind specifically to the complexes described herein. By “specifically binds” is meant an antibody that recognizes and binds to a particular polypeptide complex of the invention, but which does not substantially recognize or bind to other molecules in a sample, or to any of the polypeptides of the complex when those polypeptides are not complexed.

[0085] For example, a purified complex, or a portion, variant, or fragment thereof, can be used as an immunogen to generate antibodies that specifically bind the complex using standard techniques for polyclonal and monoclonal antibody preparation.

[0086] A full-length polypeptide complex can be used, if desired. Alternatively, the invention provides antigenic fragments of polypeptide complexes for use as immunogens. In some embodiments, the antigenic complex fragment includes at least 6, 8, 10, 15, 20, or 30 or more amino acid residues of a polypeptide. In one embodiment, epitopes encompassed by the antigenic peptide include the binding domains of the polypeptides, or are located on the surface of the protein, e.g., hydrophilic regions.

[0087] If desired, peptides containing antigenic regions can be selected using hydropathy plots showing regions of hydrophilicity and hydrophobicity. These plots may be generated by any method well known in the art, including, for example, the Kyte Doolittle or the Hopp Woods methods, either with or without Fourier transformation. See, e.g., Hopp and Woods, Proc. Nat. Acad. Sci. USA 78:3824-3828 (1981); Kyte and Doolittle, J. Mol. Biol. 157:105-142 (1982).

[0088] The term “antibody” as used herein refers to immunoglobulin molecules and immunologically active portions of immunoglobulin molecules, i.e., molecules that contain an antigen binding site that specifically binds (immunoreacts with) an antigen, such as a polypeptide complex. Such antibodies include, e.g., polyclonal, monoclonal, chimeric, single chain, Fab and F(ab′)₂ fragments, and an Fab expression library. In specific embodiments, antibodies to human ortholog complexes.

[0089] Various procedures known within the art may be used for the production of polyclonal or monoclonal antibodies. For example, for the production of polyclonal antibodies, various suitable host animals (e.g., rabbit, goat, mouse or other mammal) may be immunized by injection with the native protein, or a synthetic variant thereof, or a derivative of the foregoing. An appropriate immunogenic preparation can contain, for example, recombinantly expressed polypeptide complex. Alternatively, the immunogenic polypeptides or complex may be chemically synthesized, as discussed above. The preparation can further include an adjuvant. Various adjuvants used to increase the immunological response include, e.g., Freund's (complete and incomplete), mineral gels (e.g., aluminum hydroxide), surface active substances (e.g., lysolecithin, pluronic polyols, polyanions, peptides, oil emulsions, dinitrophenol, etc.), human adjuvants such as Bacille Calmette-Guerin and Corynebacterium parvum, or similar immunostimulatory agents. If desired, the antibody molecules directed against complex can be isolated from the mammal (e.g., from the blood) and further purified by well known techniques, such as protein A chromatography to obtain the IgG fraction.

[0090] The term “monoclonal antibody” or “monoclonal antibody composition”, as used herein, refers to a population of antibody molecules that contain only one species of an antigen binding site capable of immunoreacting with a particular epitope of a polypeptide complex. A monoclonal antibody composition thus typically displays a single binding affinity for a particular protein with which it immunoreacts. For preparation of monoclonal antibodies directed towards a particular complex, or polypeptide, any technique that provides for the production of antibody molecules by continuous cell line culture may be utilized. Such techniques include, e.g., the hybridoma technique (see Kohler & Milstein, Nature 256: 495-497 (1975)); the trioma technique; the human B-cell hybridoma technique (see Kozbor, et al., Immunol Today 4: 72 (1983)); and the EBV hybridoma technique to produce human monoclonal antibodies (see Cole, et al., In: Monoclonal Antibodies and Cancer Therapy, Alan R. Liss, Inc., (1985) pp. 77-96). If desired, human monoclonal antibodies may be prepared by using human hybridomas (see Cote, et al., Proc. Natl. Acad. Sci. USA 80: 2026-2030 (1983)) or by transforming human B-cells with Epstein Barr Virus in vitro (see Cole, et al., In: Monoclonal Antibodies and Cancer Therapy, supra).

[0091] Methods can be adapted for the construction of Fab expression libraries (see e.g. Huse, et al., Science 246: 1275-1281 (1989)) to allow rapid and effective identification of monoclonal F_{ab} fragments with the desired specificity for the desired protein or derivatives, fragments, analogs or homologs thereof. Non-human antibodies can be “humanized” by techniques well known in the art. See e.g., U.S. Pat. No. 5,225,539. Antibody fragments that contain the idiotypes to a polypeptide or polypeptide complex may be produced by techniques known in the art including, e.g.: (i) an F_{(ab′)2} fragment produced by pepsin digestion of an antibody molecule; (ii) an F_{ab} fragment generated by reducing the disulfide bridges of an F_{(ab′)2} fragment; (iii) an F_{ab} fragment generated by the treatment of the antibody molecule with papain and a reducing agent and (iv) Fᵥ fragments.

[0092] Chimeric and humanized monoclonal antibodies against the polypeptide complexes, or polypeptides, described herein are also within the scope of the invention, and can be produced by recombinant DNA techniques known in the art, for example using methods described in PCT International Application No. PCT/US86/02269; European Patent Application No. 184,187; European Patent Application No. 171,496; European Patent Application No. 173,494; PCT International Publication No. WO 86/01533; U.S. Pat. No. 4,816,567; European Patent Application No. 125,023; Better et al., Science 240: 1041-1043 (1988); Liu et al., Proc. Nat. Acad. Sci. USA 84: 3439-3443 (1987); Liu et al., J. Immunol. 139: 3521-3526 (1987); Sun et al., Proc. Nat. Acad. Sci. USA 84: 214-218 (1987); Nishimura et al., Cancer Res. 47: 999-1005 (1987); Wood et al., Nature 314: 446-449 (1985); Shaw et al., J. Natl. Cancer Inst. 80: 1553-1559 (1988); Morrison, Science 229: 1202-1207 (1985); Oi et al., BioTechniques 4: 214 (1986); U.S. Pat. No. 5,225,539; Jones et al., Nature 321: 552-525 (1986); Verhoeyan et al., Science 239: 1534 (1988); and Beidler et al., J. Immunol. 141: 4053-4060 (1988).

[0093] Methods for the screening of antibodies that possess the desired specificity include, e.g., enzyme-linked immunosorbent assay (ELISA) and other immunologically-mediated techniques known within the art. For example, selection of antibodies that are specific to a particular domain of a polypeptide complex is facilitated by generation of hybridomas that bind to the complex, or fragment thereof, possessing such a domain.

[0094] In certain embodiments of the invention, antibodies specific for the polypeptide complexes described herein may be used in various methods, such as detection of complex, and identification of agents which disrupt complexes. These methods are described in more detail, below. Detection can be facilitated by coupling (i.e., physically linking) the antibody to a detectable substance. Examples of detectable substances include various enzymes, prosthetic groups, fluorescent materials, luminescent materials, bioluminescent materials, and radioactive materials. Examples of suitable enzymes include horseradish peroxidase, alkaline phosphatase, β-galactosidase, or acetylcholinesterase; examples of suitable prosthetic group complexes include streptavidin/biotin and avidin/biotin; examples of suitable fluorescent materials include umbelliferone, fluorescein, fluorescein isothiocyanate, rhodamine, dichlorotriazinylamine fluorescein, dansyl chloride or phycoerythrin; an example of a luminescent material includes luminol; examples of bioluminescent materials include luciferase, luciferin, and aequorin, and examples of suitable radioactive material include ¹²⁵I, ¹³¹I, ³⁵S or ³H.

[0095] Polypeptide complex-specific, or polypeptide-specific antibodies, can also be used to isolate complexes using standard techniques, such as affinity chromatography or immunoprecipitation. Thus, the antibodies disclosed herein can facilitate the purification of specific polypeptide complexes from cells, as well as recombinantly produced complexes expressed in host cells.

Kits

[0096] In a specific embodiment, the invention provides kits containing a reagent, for example, an antibody described above, which can specifically detect a polypeptide complex, or a constituent polypeptide, described herein. Such kits can contain, for example, reaction vessels, reagents for detecting complex in sample, and reagents for development of detected complex, e.g. a secondary antibody coupled to a detectable marker. The label incorporated into the anti-complex, or anti-polypeptide antibody may include, e.g., a chemiluminescent, enzymatic, fluorescent, colorimetric or radioactive moiety. Kits of the present invention may be employed in diagnostic and/or clinical screening assays.

Pharmaceutical Compositions

[0097] The invention further provides pharmaceutical compositions of purified complexes suitable for administration to a subject, most preferably, a human, in the treatment of disorders involving altered levels of such complexes. Such preparations include a therapeutically-effective amount of a complex, and a pharmaceutically acceptable carrier. As utilized herein, the term “pharmaceutically acceptable” means approved by a regulatory agency of the Federal or a state government or listed in the U.S. Pharmacopoeia or other generally recognized pharmacopoeia for use in animals and, more particularly, in humans. The term “carrier” refers to a diluent, adjuvant, excipient, or vehicle with which the therapeutic is administered and includes, but is not limited to such sterile liquids as water and oils.

[0098] The therapeutic amount of a complex which will be effective in the treatment of a particular disorder or condition will depend on the nature of the disorder or condition, and may be determined by standard clinical techniques by those of average skill within the art. In addition, in vitro assays may optionally be employed to help identify optimal dosage ranges. The precise dose to be employed in the formulation will also depend on the route of administration, and the overall seriousness of the disease or disorder, and should be decided according to the judgment of the practitioner and each patient's circumstances. However, suitable dosage ranges for intravenous administration of the complexes of the present invention are generally about 20-500 micrograms (μg) of active compound per kilogram (Kg) body weight. Suitable dosage ranges for intranasal administration are generally about 0.01 pg/kg body weight to 1 mg/kg body weight. Effective doses may be extrapolated from dose-response curves derived from in vitro or animal model test systems. Suppositories generally contain active ingredient in the range of 0.5% to 10% by weight; oral formulations preferably contain 10% to 95% active ingredient.

[0099] Various delivery systems are known and can be used to administer a pharmaceutical preparation of a complex of the invention including, e.g.: (i) encapsulation in liposomes, microparticles, microcapsules; (ii) recombinant cells capable of expressing the polypeptides of the complex; (iii) receptor-mediated endocytosis (see, e.g., Wu et al., J. Biol. Chem. 262: 4429-4432 (1987)); (iv) construction of a nucleic acid encoding the polypeptides of the complex as part of a retroviral or other vector, and the like.

[0100] Methods of administration include, e.g., intradermal, intramuscular, intraperitoneal, intravenous, subcutaneous, intranasal, epidural, and oral routes. The pharmaceutical preparations of the present invention may be administered by any convenient route, for example by infusion or bolus injection, by absorption through epithelial or mucocutaneous linings (e.g., oral mucosa, rectal and intestinal mucosa, etc.) and may be administered together with other biologically-active agents. Administration can be systemic or local. In addition, it may be advantageous to administer the pharmaceutical preparation into the central nervous system by any suitable route, including intraventricular and intrathecal injection. Intraventricular injection may be facilitated by an intraventricular catheter attached to a reservoir (e.g., an Ommaya reservoir). Pulmonary administration may also be employed by use of an inhaler or nebulizer, and formulation with an aerosolizing agent. It may also be desirable to administer the pharmaceutical preparation locally to the area in need of treatment; this may be achieved by, for example, and not by way of limitation, local infusion during surgery, topical application, by injection, by means of a catheter, by means of a suppository, or by means of an implant. In a specific embodiment, administration may be by direct injection at the site (or former site) of a malignant tumor or neoplastic or pre-neoplastic tissue.

[0101] Alternatively, pharmaceutical preparations of the invention may be delivered in a vesicle, in particular a liposome, (see, e.g., Langer, Science 249:1527-1533 (1990)) or via a controlled release system including, e.g., a delivery pump (see, e.g., Saudek, et al., New Engl. J. Med. 321: 574 (1989) and a semi-permeable polymeric material (see, e.g., Howard, et al., J. Neurosurg. 71: 105 (1989)). Additionally, the controlled release system can be placed in proximity of the therapeutic target (e.g., the brain), thus requiring only a fraction of the systemic dose. See, e.g., Goodson, In: Medical Applications of Controlled Release, 1984 (CRC Press, Bocca Raton, Fla.).

Screening, Diagnostic, and Therapeutic Methods

[0102] The invention further provides methods of identifying an agent which modulate formation or stability a polypeptide complex described herein. By modulate is meant to increase or decrease the rate at which the complex is assembled or dissembled, or to increase or decrease the stability of an assembled complex. Thus, an agent can be tested for its ability to disrupt a complex, or to promote formation or stability of a complex.

[0103] In one embodiment, the invention provides a method of identifying an agent that promotes disruption of a complex. The method includes providing a polypeptide complex, contacting the complex with a test agent, and detecting the presence of a polypeptide displaced from the complex. The presence of displaced polypeptide indicates the disruption of the complex by the agent. In some embodiments, the complex is a human ortholog complex, as described above, which includes “bait” and “prey” proteins selected from those recited in Tables 4 through 7. Agents which disrupt complexes of the invention may present novel modulators of cell processes and pathways in which the complexes participate. For example, agents which disrupt complexes involving EGFR proteins, DLG, ubiquitin 9 or may be selected as potential HPV therapeutics. In another embodiment, against which modulate the activity of BCR1, GAP or other effectors of CDC42-pathways are encompassed by the invention.

[0104] Any compound or other molecule (or mixture or aggregate thereof) can be used as a test agent. In some embodiments, the agent can be a small peptide, or other small molecule produced by e.g., combinatorial synthetic methods known in the art. Disruption of the complex by the test agent, e.g. binding of the agent to the complex, can be determined using art recognized methods, e.g., detection of polypeptide using polypeptide-specific antibodies, as described above. Bound agents can alternatively be identified by comparing the relative electrophoretic mobility of complexes exposed to the test agent to the mobility of complexes that have not been exposed to the test agent.

[0105] Agents identified in the screening assays can be further tested for their ability to alter and/or modulate cellular functions, particularly those functions in which the complex has been implicated. These functions include, e.g., control of cell-cycle progression; regulation of transcription; control of intracellular signal transduction, etc., as described in detail above.

[0106] In another embodiment, the invention provides methods for inhibiting the interaction of a polypeptide with a ligand, by contacting a complex of the protein and the ligand with an agent that disrupts the complex, as described above. In certain embodiments, the polypeptides are associated with protein synthesis, folding or turnover and vesicle trafficking molecules. In certain embodiments, the ligand is an interacting polypeptide, and the polypeptide and ligands are selected from those recited in Tables 1-7, preferably Tables 4-7, and most preferably interactions involving HPV 16. Inhibition of complex formation allows for modulation of cellular functions and pathways in which the targeted complexes participate.

[0107] In another embodiment, the invention provides a method for identifying a polypeptide complex in a subject. The method includes the steps of providing a biological sample from the subject, detecting, if present, the level of polypeptide complex. In some embodiments, the complex includes a first polypeptide (a “bait” polypeptide) selected from the polypeptides recited in Tables 4-7, column 2 or 3, and a second polypeptide (“prey” polypeptide) selected from the polypeptides recited in Tables 4-7, column 5 or 6. Any suitable biological sample potentially containing the complex may be employed, e.g. blood, urine, cerebral-spinal fluid, plasma, skin, etc. Complexes may be detected by, e.g., using complex-specific antibodies as described above. The method provides for diagnostic screening, including in the clinical setting, using, e.g., the kits described above.

[0108] In still another embodiment, the present invention provides methods for detecting a polypeptide in a biological sample, by providing a biological sample containing the polypeptide, contacting the sample with a corresponding polypeptide to form a complex under suitable conditions, and detecting the presence of the complex. A complex will form if the sample does, indeed, contain the first polypeptide. In some embodiments, the polypeptide being detecting is a “prey” protein selected from the polypeptides recited in Tables 1 through 7, columns 2 or 3, and is detected by complexing with the corresponding “bait” protein recited in Tables 1-7, column 5 or 6. Conversely, in other embodiments the polypeptide being detected is the “bait” protein. Alternatively, a yeast “bait” or “prey” ortholog may be employed to form a chimeric complex with the polypeptide in the biological sample.

[0109] In still another embodiment, the invention provides methods for removing a first polypeptide from a biological sample by contacting the biological sample with the corresponding second peptide to form a complex under conditions suitable for such formation. The complex is then removed from the sample, effectively removing the first polypeptide. As with the methods of detecting polypeptide described above, the polypeptide being removed may be either a “bait” or “prey” protein, and the second corresponding polypeptide used to remove it may be either a yeast or human ortholog polypeptide.

[0110] Methods of determining altered expression of a polypeptide in a subject, e.g. for diagnostic purposes, are also provided by the invention. Altered expression of proteins involved in cell processes and pathways can lead to deleterious effects in the subject. Altered expression of a polypeptide in a given pathway leads to altered formation of complexes which include the polypeptide, hence providing a means for indirect detection of the polypeptide level. The method involves providing a biological sample from a subject, measuring the level of a polypeptide complex of the invention in the sample, and comparing the level to the level of complex in a reference sample having known polypeptide expression. A higher or lower complex level in the sample versus the reference indicates altered expression of either of the polypeptides that forms the complex. The detection of altered expression of a polypeptide can be use to diagnose a given disease state, and or used to identify a subject with a predisposition for a disease state. Any suitable reference sample may be employed, but preferably the test sample and the reference sample are derived from the same medium, e.g. both are urine, etc. The reference sample should be suitably representative of the level polypeptide expressed in a control population.

[0111] The invention further provides methods for treating or preventing a disease or disorder involving altered levels of a polypeptide complex, or polypeptide, disclosed herein, by administering to a subject a therapeutically-effective amount of at least one molecule that modulates the function of the complex. As discussed above, altered levels of polypeptide complexes described herein may be implicated in disease states resulting from a deviation in normal function of the pathway in which a complex is implicated. For example, altered levels of the observed complex between E6 or E7 and DLG tumor suppressor or Ubiquitin protease 9 may be implicated in abrogation of p53 interactions. In subjects with a deleteriously high level of complex, modulation may consist, for example, by administering an agent which disrupts the complex, or an agent which does not disrupt, but down-regulates, the functional activity of the complex. Alternatively, modulation in subjects with a deleteriously low level of complex may be achieved by pharmaceutical administration of complex, constituent polypeptide, or an agent which up-regulates the functional activity of complex. Pharmaceutical preparations suitable for administration of complex are described above.

[0112] In one embodiment, a disease or disorder involving altered levels of a polypeptide selected from the polypeptides recited in Tables 1 through 7 or the corresponding polypeptides in columns 2 or 5, are treated by administering a molecule that modulates the function of the polypeptide. In certain embodiments, the modulating molecule is the corresponding polypeptide, e.g. administering a “prey” protein corresponding to a “bait” protein modulates the latter by forming a complex with it.

[0113] The details of one or more embodiments of the invention are set forth in the description above. Although any methods and materials similar or equivalent to those described herein can be used in the practice of the present invention, the preferred methods and materials are now described. For example, additional interactions can be identified using other two-hybrid systems (i.e. using a LexA binding domain fusion or HIS3 as a reporter gene), including variables such as different protein domains or genomic activation domain libraries. Other features, objects, and advantages of the invention will be apparent from the description and from the claims.

[0114] The practice of the present invention generally employs conventional techniques of molecular biology, microbiology, recombinant DNA, and immunology, which are within the skill of the art. Such techniques are explained fully in the literature. See for example J. Sambrook et al., “Molecular Cloning; A Laboratory Manual” (1989); “DNA Cloning”, Vol. I and II (D. N. Glover ed., 1985); “Oligonucleotide Synthesis” (M. J. Gait ed., 1984); “Nucleic Acid Hybridization” (B. D. Hames and S. J. Higgins eds., 1984); “Transcription and Translation” (B. D. Hames & S. J. Higgins eds., 1984); “Animal Cell Culture” (R. I. Freshney ed., 1986); “Immobilized Cells and Enzymes” (IRL Press, 1986); “A Practical Guide to Molecular Cloning” (B. Perbal, 1984); the series, “Methods in Enzymology” (Academic Press, Inc.); “Gene Transfer Vectors for Mammalian Cells” (J. H. Miller and M. P. Calos eds., 1987, Cold Spring Harbor Laboratory); Meth. Enzymol. (1987) 154 and 155 (Wu and Grossman, and Wu eds., respectively); “Immunochemical Methods in Cell and Molecular Biology” (Academic Press, London); “Protein Purification: Principles and Practice”, Third Ed. (Scopes, Springer-Verlag, N.Y., 1994); and “Handbook of Experimental Immunology”, Volumes I-IV (Weir and Blackwell, eds., 1986).

[0115] The following examples are presented in order to more fully illustrate the preferred embodiments of the invention. These examples should in no way be construed as limiting the scope of the invention, as defined by the appended claims.

### EXAMPLE 1

### SeqCalling™ Technology

[0116] cDNA was derived from various human samples representing multiple tissue types, normal and diseased states, physiological states, and developmental states from different donors. Samples were obtained as whole tissue, primary cells or tissue cultured primary cells or cell lines. Cells and cell lines may have been treated with biological or chemical agents that regulate gene expression, for example, growth factors, chemokines or steroids. The cDNA thus derived was then sequenced using CuraGen's proprietary SeqCalling technology. Sequence traces were evaluated manually and edited for corrections if appropriate. cDNA sequences from all samples were assembled together, sometimes including public human sequences, using bioinformatic programs to produce a consensus sequence for each assembly. Each assembly was included in CuraGen Corporation's database. Sequences were included as components for assembly when the extent of identity with another component was at least 95% over 50 bp. Each assembly represents a gene or portion thereof and includes information on variants, such as splice forms single nucleotide polymorphisms (SNPs), insertions, deletions and other sequence variations.

### EXAMPLE 2

### Identifying Nucleic Acids and Proteins by PathCalling™

[0117] The sequences of the HPV proteins and interactors in this application were derived by laboratory cloning of cDNA fragments and by in silico prediction of the sequence as described in Example A. cDNA fragments covering either the full length of the DNA sequence, or part of the sequence, or both, were cloned. In silico prediction was based on sequences available in CuraGen's proprietary sequence databases or in the public human sequence databases, and provided either the full-length DNA sequence, or some portion thereof.

[0118] cDNA libraries were derived from various human samples representing multiple tissue types, normal and diseased states, physiological states, and developmental states from different donors. Samples were obtained as whole tissue, primary cells or tissue cultured primary cells or cell lines. Cells and cell lines may have been treated with biological or chemical agents that regulate gene expression, for example, growth factors, chemokines or steroids.

[0119] Preparation of Yeast Cells

[0120] Yeast lysates were produced as follows: 1-1.5 ml samples from a yeast culture were removed, samples were frozen on dry ice. On ice, low-salt lysis Buffer was added to the cell pellets. Glass beads were added, the cells were resuspended by a brief vortexing. The cells were lysed by beating the beads for 90 sec. The lysate was placed on ice for 5 min and the beads beaten again for 90 sec. The sample were put back on ice. Once the lysate was recovered free of beads, the lysate was centrifuge at maximum speed in a microcentrifuge for 3 to 5 min at 4° C. and put back on ice. 25 to 50 μl were removed from the supernatant and mixed with an equal volume of 2× Protein Sample Buffer then saved for Western analysis.

[0121] Immunoprecipitation from Yeast

[0122] The lysate samples were thawed and the desired volume (based on the protein concentration) were put into a fresh microcentrifuge tube. All the samples were made into the same volume with fresh low-salt lysis Buffer. Antibody was diluted in Low-Salt Lysis Buffer (10 μl per sample) and mixed by vortexing. This was incubated on ice for 30 min.

ProteinA-Sepharose/Antibody Binding

[0123] Protein A-Sepharose beads were equilibrated with low-salt lysis Buffer by suspending the beads in low-salt Buffer, centrifuging briefly to sediment the beads and removing the supernatant. This equilibration was repeated then a wash step was peformed for 2 or 3 times. The Buffer-equilibrated beads were aliquoted into fresh 0.5 ml microcentrifuge tubes making sure that all the tubes had an equal amount of beads. The antibody/extract mixture was centrifuged in a microcentrifuge at full speed for 1 min at 4° C. The supernatant was recovered and added to the proteinA-Sepharose. The mixture was mixed in an end-over-end rotator for 1 to 2 hr at 4° C. then centrifuged briefly in a microcentrifuge (bringing the centrifuge up to full speed and then back down). The supernatant was removed. Keeping the samples on ice as much as possible, the beads were washed by adding 400 μl of bead Buffer. The beads were resuspended and centrifuged again. The supernatant was removed. The beads were resuspended in bead Buffer and the mixture transferred to a fresh tube. The old tube was rinsed with more bead-Buffer to recover residual beads to the new tube. The beads were centrifuged, the supernatant removed and the beads washed with Bead Buffer.

[0124] If the immunoprecipitate is only for analysis of radio-labeled proteins bound, the beads can be simply resuspended in protein sample Buffer, boiled for 90 sec and electrophoresed. If an enzymatic assay of some sort is involved, the beads should be washed in the reaction Buffer 1 or 2 times.

[0125] In cases where interactions cannot be validated in the yeast system, the interacting proteins are tagged with different epitopes at the N or the C-terminus and expressed in appropriate mammalian cell lines by transient transfection. The cells are grown for 48-72 h, lysed, and the substrate protein is immunoprecipitated using antibody specific to the epitope and analyzed by western blotting as described for the yeast system.

### EXAMPLE 3

### Yeast 2 Hybrid Analysis of Interactions

[0126] The cDNA thus derived was then directionally cloned into the appropriate two-hybrid vector (Gal4-activation domain (Gal4-AD) fusion). Such cDNA libraries as well as commercially available cDNA libraries from Clontech (Palo Alto, Calif.) were then transferred from E. coli into a CuraGen Corporation proprietary yeast strain (disclosed in U.S. Pat. Nos. 6,057,101 and 6,083,693, incorporated herein by reference in their entireties).

[0127] Gal4-binding domain (Gal4-BD) fusions of a CuraGen Corporation proprietary library of human sequences was used to screen multiple Gal4-AD fusion cDNA libraries resulting in the selection of yeast hybrid diploids in each of which the Gal4-AD fusion contains an individual cDNA. Each sample was amplified using the polymerase chain reaction (PCR) using non-specific primers at the cDNA insert boundaries.

[0128] Physical clone: the cDNA fragment derived by the screening procedure is a recombinant DNA covering the entire open reading frame. The cDNA was cloned into pACT2 plasmid (Clontech) and used to make the cDNA library. The recombinant plasmid was inserted into the host and selected by the yeast hybrid diploid generated during the screening procedure by the mating of both CuraGen Corporation proprietary yeast strains N₁O₆′ and YULH (U.S. Pat. Nos. 6,057,101 and 6,083,693) to provide the clones.

[0129] Interaction protein pairs are added to CuraGen's PathCalling™ Protein Interaction Database. This database allows for the discovery of novel pharmaceutical drug targets by virtue of their interactions and/or presence in pathologically related signaling pathways. Protein interactions are subsequently analyzed using bioinformatic tools within GeneScape™, which provides a means of visualization of binary protein interactions, protein complex formation, as well as complete cellular signaling pathways. Specifically, the sequences, which encode proteins identified by INT ID in Tables 1 through 3 were found to interact and resulted in the formation of a protein complex within a series of complexes resulting in identification of a protein interaction. The interaction is specifically relevant to HPV pathology. The specific interactions, which constitute the specific complexes, is useful for therapeutic intervention through the use of recombinant protein or antibody therapies, small molecule drugs, or gene therapy approaches. Protein interactions, which are identified through the mining of the PathCalling™ database, can be screened in vitro and in vivo to provide expression, functional, biochemical, and phenotypic information. Assays for expression, functional, biochemical, phenotypic, diagnostic, prognostic, monitoring of HPV-induced tumors' and/or lesions' response to therapy, immunization, therapeutic immunization, immunotherapy, tumor burden monitoring, ELISA assay to determine if an infection is active or latent, and the like may be used alone or in conjunction and include, but are not limited to the following technologies; RTQ-PCR, transfection of recombinant proteins, co-immunoprecipitation and mass spectrometry, FRET, Affinity Chromatography, Immunohistochemisty or Immunocytochemistry, gene CHIP hybridizations, antisense (i.e. knock-down, knock-up), GeneCalling experiments, and/or biochemical assays (phosphorylation, dephosphorylation, protease, etc . . . ).

Example D Protein-Protein Interactions

[0130] The amino acid sequences of the polypeptides involved in the novel protein-protein interactions and the nucleic acid sequences of the polynucleotides which encode them are listed below.

[0131] Protein SEQ IDs:

TABLE 10

| | |
|---|---|
| cbe_1380530 RPL13 | |
| ribosomal protein L13 | |
| length = 211 | |
| MAPSRNGMVLKPHFHKDWQRRVATWFNQPARKIRRRKARQAKARRIAPRPASGPIRPIVR | SEQ ID NO: 1 |
| CPTVRYHTKVRAGRGFSLEELRVAGIHKKVARTIGISVDPRRRNKSTESLQTNVQRLKEY | |
| RSKLILFPRKPSAPKKGDSSAEELKLATQLTGPVMPVRNVYKKEKARVITEEEKNFKAFA | |
| SLRMARANARLFGIRAKRAKEAAEQDVEKKK | |

[0132] TABLE 11

| | |
|---|---|
| cbe_1469980 FLJ20259 | |
| hypothetical protein FLJ20259 | |
| length = 776 | |
| MNNSLENTISFEEYIRVKARSVPQHRMKEFLDSLASKGPEALQEFQQTATTTMVYQQGGN | SEQ ID NO: 2 |
| CIYTDSTEVAGSLLELACPVTTSVQPQTQQEQQIQVQQPQQVQVQVQVQQSPQQVSAQLS | |
| PQLTVHQPTEQPIQVQVQIQGQAPQSAAPSIQTPSLQSPSPSQLQAAQIQVQHVQAAQQI | |
| QAAEIPEEHIPHQQIQAQLVAGQSLAGGQQIQIQTVGALSPPPSQQGSPREGERRVGTAS | |
| VLQPVKKRKVEMPITVSYAISGQPVATVLAIPQGQQQSYVSLRPDLLTVDSAHLYSATGT | |
| ITSPTGETWTIPVYSAQPRGDPQQQSITHIAIPQEAYNAVHVSGSPTALAAVKLEDDKEK | |
| MVGTTSVVKNSHEEVVQTLANSLFPAQFMNGNIHIPVAVQAVAGTYQNTAQTVHIWDPQQ | |
| QPQQQTPQEQTPPPQQQQQQLQVTCSAQTVQVAEVEPQSQPQPSPELLLPNSLKPEEGLE | |
| VWKNWAQTKNAELEKDAQNRLAPIGRRQLLRFQEDLISSAVAELNYGLCLMTREARNGEG | |
| EPYDPDVLYYIFLCIQKYLFENGRVDDIFSDLYYVRFTEWLHEVLKDVQPRVTPLGYVLP | |
| SHVTEEMLWECKQLGAHSPSTLLTTLMFFNTKYFLLKTVDQHMKLAFSKVLRQTKKNPSN | |
| PKDKSTSIRYLKALGIHQTGQKVTDDMYAEQTENPENPLRCPIKLYDFYLFKCPQSVKGR | |
| NDTFYLTPEPVVAPNSPIWYSVQPISREQMGQMLTRILVIREIQEAIAVANASTMH | |

[0133] TABLE 12

| | |
|---|---|
| cbe_1505425 HCDI | |
| HCDI protein | |
| length = 319 | |
| MGWRRKRVPQRGRKAPPPQLHGNINNLYFPIRWRDRLHWDSPNPAAECQRHEVTLVSRKP | SEQ ID NO: 3 |
| GPGRITWDELAASGLPSCDAAVNLAGENILNPLRRWNETFQKEVLGSRLETTQLLAKAIT | |
| KAPQPPKAWVLVTGVAYYQPSLTAEYDEDSPGGDFDFFSNLVTKWEAAARLPGDSTRQVV | |
| VRSGVVLGRGGGAMGHMLLPFRLGLGGPIGSGHQFFPWIHIGDLAGILTHALEANHVHGV | |
| LNGVAPSSATNAEFAQTLGAALGRRAFIPLPSAVVQAVFGRQRAIMLLEGQKVIPQRTLA | |
| TGYQYSFPELGAALKEIVA | |

[0134] TABLE 13

| | |
|---|---|
| cbe_1710 QP-C | |
| low molecular mass ubiquinone-binding protein (9.5 kD) | |
| length = 93 | |
| MGREFGNLTRMRHVISYSLSPFEQRAYPHVFTKGIPNVLRRIRESFFRVVPQFVVFYLIY | SEQ ID NO: 4 |
| TWGTEEFERSKRRIQLPMKMTNEQRIRMTVPCL | |

[0135] TABLE 14

cbe_1796502 CTNND2
catenin (cadherin-associated protein), delta 2 (neural plakophilin-related
arm-repeat protein)
length = 1225

| | |
|---|---|
| MFARKPPGAAPLGAMPVPDQPSSASEKTSSLSPGLNTSNGDGSETETTSAILASVKEQEL | SEQ ID NO: 5 |
| QFERLTRELEAERQIVASQLERCKLGSETGSMSSMSSAEEQFQWQSQDGQKDIEDELTTG | |
| LELVDSCIRSLQESGILDPQDYSTCERPSLLSQSALQLNSKPEGSFQYPASYHSNQTLAL | |
| GETTPSQLPARGTQARATGQSFSQGTTSPAGHLAGPEPAPPPPPPPREPFAPSLGSAFHL | |
| PDAPPAAAAAALYYSSSTLPAPPRGGSPLAAPQGGSPTKLQRGGSAPEGATYAAPRGSSP | |
| KQSPSRLAKSYSTSSPINIVVSSAGLSPIRVTSPPTVQSTISSSPIHQLSSTIGTYATLS | |
| PTKRLVHASEQYSKHSQELYATATLQRPGSLAAGSRASYSSQHGHLGPELRALQSPEHHI | |
| DPIYEDRVYQKPPMRSLSQSQCDPLPPAHTGTYRTSTAPSSPGVDSVPLQRTGSQHGPQN | |
| AAAATFQRASYAAGPASNYADPYRQLQYCPSVESPYSKSGPALPPEGTLARSPSIDSIQK | |
| DPREFGWRDPELPEVIQMLQHQFPSVQSNAAAYLQHLCFGDNKIKAEIRRQGGIQLLVDL | |
| LDHRMTEVHRSACGALRNLVYGKANDDNKIALKWCGGIPALVRLLRKTTDLEIRELVTGV | |
| LWNLSSCDALKMPIIQDALAVLTNAVIIPHSGWENSPLQDDRKIQLHSSQVLRNATGCLR | |
| NVSSAGEEARRRMRECDGLTDALLYVIQSALGSSEIDSKTVENCVCILRNLSYRLAAETS | |
| QGQHMGTDELDGLLCGEANGKDAESSGCWGKKKKKKKSQDQWDGVGPLPDCAEPPKGIQM | |
| LWHPSIVKPYLTLLSECSNPDTLEGAACALQNLAAGSWKWSVYIRAAVRKEKGLPILVEL | |
| LRIDNDRVVCAVATALRNMALDVRNKELIGKYAMRDLVHRLPGGNNSNNTASKANSDDTV | |
| TAVCCTLHEVITKNMENAKALRDAGGIEKLVGISKSKGDKHSPKVVKAASQVLNSMWQYR | |
| DLRSLYKKDGWSQYHFVASSSTIERDRQRPYSSSRTPSISPVRVSPNNRSASAPASPREM | |
| ISLKERKTDYECTGSNATYHGAKGEHTSRKDANTAQNTGISTLYRNSYGAPAEDIKHNQV | |
| SAQPVPQEPSRKDYETYQPFQNSTRNYDESFFEDQVHHRPPASEYTMHLGLKSTGNYVDF | |
| YSAARPYSELNYETSHYPASPDSWV | |

[0136] TABLE 15

| | |
|---|---|
| cbe_1807361 FLJ22729 | |
| hypothetical protein FLJ22729 | |
| length = 158 | |
| MRGIYSSSVYLEEISSIISKMPKADFYVLEKTGLSIQNSSLFPILLHFHIMEANLYALLN | SEQ ID NO: 6 |
| KTFAQDGQHQVLSMNRNAVGKHFELMIGDSRTSGKELVKQFLFDSILKADPRVFFPSDKI | |
| VHYRQMFLSTELQRVEELYDSLLQAIAFYELAVFDSQP | |

[0137] TABLE 16

| | |
|---|---|
| cbe_2253980 Prey1135 | |
| Homo sapiens, clone MGC: 14302, mRNA, | |
| complete cds. | |
| length = 24 | |
| MHYSPDASTAFSSIAHITRDVNYG | SEQ ID NO: 7 |

[0138] TABLE 17

| | |
|---|---|
| cbe_244811 DGUOK | |
| deoxyguanosine kinase | |
| length = 189 | |
| MAAGRLFLSRLRAPFSSMAKSPLEGVSSSRGLHAGRGPRRLSIEGNIAVGKSTFVKLLTK | SEQ ID NO: 8 |
| TYPEWHVATEPVATWQNIQAAGTQKACTAQSLGNLLDMMYREPARWSYTFQTFSFLSRLK | |
| VQLEPFPEKLLQARKPVQIFERSVYSDRLHFEALMNIPVLVLDVNDDFSEEVTKQEDLMR | |
| EVNTFVKNL | |

[0139] TABLE 18

| | |
|---|---|
| cbe_250777 HPV 11 E4 | |
| Human papillomavirus 11 E4 | |
| length = 108 | |
| MVVPIIGKYVMAAQLYVLLHLYLALYEKYPLLNLLHTPPHRPPPLQCPPAPRKTACRRRL | SEQ ID NO: 9 |
| GSEHVDRPLTTPCVWPTSDPWTVQSTTSSLTITTSTKEGTTVTVQLRL | |

[0140] TABLE 19

| | |
|---|---|
| cbe_250781 HPV 11 E2 | |
| Human papillomavirus 11 E2 | |
| length = 367 | |
| MEAIAKRLDACQDQLLELYEENSIDIHKHIMHWKCIRLESVLLHKAKQMGLSHIGLQVVP | SEQ ID NO: 10 |
| PLTVSETKGHNAIEMQMHLESLAKTQYGVEPWTLQDTSYEMWLTPPKRCFKKQGNTVEVK | |
| FDGCEDNVMEYVVWTHIYLQDNDSWVKVTSSVDAKGIYYTCGQFKTYYVNFNKEAQKYGS | |
| TNHWEVCYGSTVICSPASVSSTVREVSIAEPTTYTPAQTTAPTVSACTTEDGVSAPPRKR | |
| ARGPSTNNTLCVANIRSVDSTINNIVTDNYNKHQRRNNCHSAATPIVQLQGDSNCLKCFR | |
| YRLNDKYKHLFELASSTWHWASPEAPHKNAIVTLTYSSEEQRQQFLNSVKIPPTIRHKVG | |
| FMSLHLL | |

[0141] TABLE 20

| | |
|---|---|
| cbe_250808 HPV 11 E6 | |
| Human papillomavirus 11 E6 | |
| length = 150 | |
| MESKDASTSATSIDQLCKTFNLSLHTLQIQCVFCRNALTTAEIYAYAYKNLKVVWRDNFP | SEQ ID NO: 11 |
| FAACACCLELQGKINQYRHFNYAAYAPTVEEETNEDILKVLIRCYLCHKPLCEIEKLKHI | |
| LGKARFIKLNNQWKGRCLHCWTTCMEDLLP | |

[0142] TABLE 21

| | |
|---|---|
| cbe_250834 HPV 11 E7 | |
| Human papillomavirus 11 E7 | |
| length = 98 | |
| MHGRLVTLKDIVLDLQPPDPVGLHCYEQLEDSSEDEVDKVDKQDAQPLTQHYQILTCCCG | SEQ ID NO: 12 |
| CDSNVRLVVECTDGDIRQLQDLLLGTLNIVCPICAPKP | |

[0143] TABLE 22

| | |
|---|---|
| cbe_251059 HPV 16 E1-E4 | |
| HPV 16 E1-E4 | |
| length = 92 | |
| MADPAAATKYPLLKLLGSTWPTTPPRPIPKPSPWAPKKHRRLSSDQDQSQTPETPATPLS | SEQ ID NO: 13 |
| CCTETQWTVLQSSLHLTAHTKDGLTVIVTLHP | |

[0144] TABLE 23

| | |
|---|---|
| cbe_251063 HPV 16 E1 | |
| Human papillomavirus 16 E1 | |
| length = 649 | |
| MADPAGTNGEEGTGCNGWFYVEAVVEKKTGDAISDDENENDSDTGEDLVDFIVNDNDYLT | SEQ ID NO: 14 |
| QAETETAHALFTAQEAKQHRDAVQVLKRKYLGSPLSDISGCVDNNISPRLKAICIEKQSR | |
| AAKRRLFESEDSGYGNTEVETQQMLQVEGRHETETPCSQYSGGSGGGCSQYSSGSGGEGV | |
| SERHTICQTPLTNILNVLKTSNAKAAMLAKFKELYGVSFSELVRPFKSNKSTCCDWCIAA | |
| FGLTPSIADSIKTLLQQYCLYLHIQSLACSWGMVVLLLVRYKCGKNRETIEKLLSKLLCV | |
| SPMCMMIEPPKLRSTAAALYWYKTGISNISEVYGDTPEWIQRQTVLQHSFNDCTFELSQM | |
| VQWAYDNDIVDDSEIAYKYAQLADTNSNASAFLKSNSQAKIVKDCATMCRHYKRAEKKQM | |
| SMSQWIKYRCDRVDDGGDWKQIVMFLRYQGVEFMSFLTALKRFLQGIPKKNCILLYGAAN | |
| TGKSLFGMSLMKFLQGSVICFVNSKSHFWLQPLADAKIGMLDDATVPCWNYIDDNLRNAL | |
| DGNLVSMDVKHRPLVQLKCPPLLITSNINAGTDSRWPYLHNRLVVFTFPNEFPFDENGNP | |
| VYELNDKNWKSFFSRTWSRLSLHEDEDKENDGDSLPTFKCVSGQNTNTL | |

[0145] TABLE 24

| | |
|---|---|
| cbe_251088 HPV 16 E2 | |
| Human papillomavirus 16 E2 | |
| length = 365 | |
| METLCQRLNVCQDKILTHYENDSTDLRDHIDYWKHMRLECAIYYKAREMGFKHINHQVVP | SEQ ID NO: 15 |
| TLAVSKNKALQAIELQLTLETIYNSQYSNEKWTLQDVSLEVYLTAPTGCIKKHGYTVEVQ | |
| FDGDICNTMHYTNWTHIYICEEASVTVVEGQVDYYGLYYVHEGIRTYFVQFKDDAEKYSK | |
| NKVWEVHAGGQVILCPTSVFSSNEVSSPEIIRQHLANHPAATHTKAVALGTEETQTTIQR | |
| PRSEPDTGNPCHTTKLLHRDSVDSAPILTAFNSSHKGRINCNSNTTPIVHLKGDANTLKC | |
| LRYRFKKHCTLYTAVSSTWHWTGHNVKHKSAIVTLTYDSEWQRDQFLSQVKIPKTITVST | |
| GFMSI | |

[0146] TABLE 25

| | |
|---|---|
| cbe_251445 HPV 16 E6 | |
| Human papillomavirus 16 E6 | |
| length = 158 | |
| MHQKRTAMFQDPQERPRKLPQLCTELQTTIHDIILECVYCKQQLLRREVYDFAFRDLCIV | SEQ ID NO: 16 |
| YRDGNPYAVCDKCLKFYSKISEYRHYCYSLYGTTLEQQYNKPLCDLLIRCINCQKPLCPE | |
| EKQRHLDKKQRFHNIRGRWTGRCMSCCRSSRTRRETQL | |

[0147] TABLE 26

| | |
|---|---|
| cbe_251448 HPV 16 E7 | |
| Human papillomavirus 16 E7 | |
| length = 98 | |
| MHGDTPTLHEYMLDLQPETTDLYCYEQLNDSSEEEDEIDGPAGQAEPDRAHYNIVTFCCK | SEQ ID NO: 17 |
| CDSTLRLCVQSTHVDIRTLEDLLMGTLGIVCPICSQKP | |

[0148] TABLE 27

| | |
|---|---|
| cbe_251663 HPV 11 E1 | |
| Human papillomavirus 11 E1 | |
| length = 649 | |
| MADDSGTENEGSGCTGWFMVEAIVEHTTGTQISEDEEEEVEDSGYDMVDFIDDRHITQNS | SEQ ID NO: 18 |
| VEAQALFNRQEADAHYATVQDLKRKYLGSPYVSPISNVANAVESEISPRLDAIKLTTQPK | |
| KVKRRLFETRELTDSGYGYSEVEAATQVEKHGDPENGGDGQERDTGRDIEGEGVEHREAE | |
| AVDDSTREHADTSGILELLKCKDIRSTLHGKFKDCFGLSFVDLIRPFKSDRTTCADWVVA | |
| GFGIHHSIADAFQKLIEPLSLYAHIQWLTNAWGMVLLVLIRFKVNKSRCTVARTLGTLLN | |
| IPENHMLIEPPKIQSGVRALYWFRTGISNASTVIGEAPEWITRQTVIEHSLADSQFKLTE | |
| MVQWAYDNDICEESEIAFEYAQRGDFDSNARAFLNSNMQAKYVKDCAIMCRHYKHAEMKK | |
| MSIKQWIKYRGTKVDSVGNWKPIVQFLRHQNIEFIPFLSKLKLWLHGTPKKNCIAIVGPP | |
| DTGKSCFCMSLIKFLGGTVISYVNSCSHFWLQPLTDAKVALLDDATQPCWTYMDTYMRNL | |
| LDGNPMSIDRKHRALTLIKCPPLLVTSNIDISKEEKYKYLHSRVTTFTFPNPFPFDRNGN | |
| AVYELSDANWKCFFERLSSSLDIEDSEDEEDGSNSQAFRCVPGSVVRTL | |

[0149] TABLE 28

| | |
|---|---|
| cbe_251737 HPV 16 L2 | |
| Human papillomavirus 16 L2 | |
| length = 473 | |
| MRHKRSAKRTKRASATQLYKTCKQAGTCPPDIIPKVEGKTIAVQILQYGSMGVFFGGLGI | SEQ ID NO: 19 |
| GTGSGTGGRTGYIPLGTRPPTATDTLAPVRPPLTVDPVGPSDPSIVSLVEETSFIDAGAP | |
| TSVPSIPPDVSGFSITTSTDTTPAILDINNTVTTVTTHNNPTFTDPSVLQPPTPAETGGH | |
| FTLSSSTISTHNYEEIPMDTFIVSTNPNTVTSSTPIPGSRPVARLGLYSRTTQQVKVVDP | |
| AFVTTPTKLITYDNPAYEGIDVDNTLYFSSNDNSINIAPDPDFLDIVALHRPALTSRRTG | |
| IRYSRIGNKQTLRTRSGKSIGAKVHYYYDLSTIDPAEEIELQTITPSTYTTTSHAASPTS | |
| INNGLYDIYADDFITDTSTTPVPSVPSTSLSGYIPANTTIPFGGAYNIPLVSGPDIPINI | |
| TDQAPSLIPIVPGSPQYTIIADAGDFYLHPSYYMLRKRRKRLPYFFSDVSLAA | |

[0150] TABLE 29

| | |
|---|---|
| cbe_251740 HPV 1a E1-E4 | |
| Human Papillomavirus 1a E1-E4 | |
| length = 125 | |
| MADNKAPQGLLGLLQYTPTTQPYPRVTPPSNRRPSTTPNSQDRGRPRRSDKDSRKHLYAD | SEQ ID NO: 20 |
| GLTDGEDPEVPEVEDEEKENQRPLGHPDLSLLRETLEVYTQRLKRDILQDLDDFCRKLGI | |
| HPWSV | |

[0151] TABLE 30

| | |
|---|---|
| cbe_251784 HPV 16 L1 | |
| Human papillomavirus 16 L1 | |
| length = 531 | |
| MQVTFIYILVITCYENDVNVYHIFFQMSLWLPSEATVYLPPVPVSKVVSTDEYVARTNIY | SEQ ID NO: 21 |
| YHAGTSRLLAVGHPYFPIKKPNNNKILVPKVSGLQYRVFRIHLPDPNKFGFPDTSFYNPD | |
| TQRLVWACVGVEVGRGQPLGVGISGHPLLNKLDDTENASAYAANAGVDNRECISMDYKQT | |
| QLCLIGCKPPIGEHWOKGSPCTNVAVNPGDCPPLELINTVIQDGDMVHTGFGANDFTTLQ | |
| ANKSEVPLDICTSICKYPDYIKMVSEPYGDSLFFYLRREQMFVRHLFNRAGTVGENVPDD | |
| LYIKGSGSTANLASSNYFPTPSGSMVTSDAQIFNKPYWLQRAQCHNNGICWGNQLFVTVV | |
| DTTRSTNMSLCAAISTSETTYKNTNFKEYLRHGEEYDLQFIFQLCKITLTADVMTYIHSM | |
| NSTILEDWNFGLQPPPGGTLEDTYRFVTQAIACQKHTPPAPKEDDPLKKYTFWEVNLKEK | |
| FSADLDQFPLGRKFLLQAGLKAKPKFTLGKRKATPTTSSTSTTAKRKKRIKL | |

[0152] TABLE 31

| | |
|---|---|
| cbe_251917 HPV 1a E2 | |
| Human Papillomavirus 1a E2 | |
| length = 401 | |
| MENLSSRLDLLQEQLMNLYEQDSKLIEDQIKQWNLIRQEQVLFHFARKNGVMRIGLQAVP | SEQ ID NO: 22 |
| SLASSQEKAKTAIEMVLHLESLKDSPYGTEDWSLQDTSRELFLAPPAGTFKKSGSTLEVT | |
| YDNNPDNQTRHTIWNHVYYQNGDDVWRKVSSGVDAVGVYYLEHDGYKNYYVLFAEEASKY | |
| STTGQYAVNYRGKRFTNVMSSTSSPRAAGAPAVHSDYPTLSESDTAQQSTSIDYTELPGQ | |
| GETSQVRQRQQKTPVRRRPYGRRRSRSPRGGGRREGESTPSRTPGSVPSARDVGSIHTTP | |
| QKGHSSRLRRLLQEAWDPPVVCVKGGANQLKCLRYRLKASTQVDFDSTSTTWHWTDRKNT | |
| ERIGSARMLVKFIDEAQREKFLERVALPRSVSVFLGQFNGS | |

[0153] TABLE 32

| | |
|---|---|
| cbe_251919 HPV 1a E6 | |
| Human Papillomavirus 1a E6 | |
| length = 140 | |
| MATPIRTVRQLSESLCIPYIDVLLPCNFCNYFLSNAEKLLFDHFDLHLVWRDNLVFGCCQ | SEQ ID NO: 23 |
| GCARTVSLLEFVLYYQESYEVPEIEElLDRPLLQIELRCVTCIKKLSVAEKLEVVSNGER | |
| VHRVRNRLKAKCSLCRLYAI | |

[0154] TABLE 33

| | |
|---|---|
| cbe_251925 HPV 1a E7 | |
| Human Papillomavirus 1a E7 | |
| length = 93 | |
| MVGEMPALKDLVLQLEPSVLDLDLYCYEEVPPDDIEEELVSPQQPYAVVASCAYCEKLVR | SEQ ID NO: 24 |
| LTVLADHSAIRQLEELLLRSLNIVCPLCTLQRQ | |

[0155] TABLE 34

| | |
|---|---|
| cbe_251976 FLJ23584 | |
| hypothetical protein FLJ23584 | |
| length = 234 | |
| MNPVPHWGEVFLLVGGEGEHLASQGTTPARDHRVGTSPASQQAQPESWRRRQRDKGVDPE | SEQ ID NO: 25 |
| KAPSLTRQSQNPPSLTAPLGMPSACSCLPCGPAPEAAIILAGPPTALTVLPKGTGLKKSK | |
| RLLLESLMRRRIAHLKWGLPRRILESYFLFNFLGSCSLTLAGARISGLNTGQELQAQQER | |
| YCEAQGSPPGLKSPERFQRVQRPDRKSSKLPIQARALERNRPHMSEPIKHFHPA | |

[0156] TABLE 35

| | |
|---|---|
| cbe_252016 HPV 1a L1 | |
| Human Papillomavirus 1a L1 | |
| length = 508 | |
| MYNVFQMAVWLPAQNKFYLPPQPITRILSTDEYVTRTNLFYHATSERLLLVGHPLFEISS | SEQ ID NO: 26 |
| NQTVTIPKVSPNAFRVFRVRFADPNRFAFGDKAIFNPETERLVWGLRGIEIGRGQPLGIG | |
| ITGHPLLNKLDDAENPTNYINTHANGDSRQNTAFDAKQTQMFLVGCTPASGEHWTSSRCP | |
| GEQVKLGDCPRVQMIESVIEDCDMMDIGFGAMDFAALQQDKSDVPLDVVQATCKYPDYIR | |
| MNHEAYGNSMFFFARREQMYTRHFFTRGGSVGDKEAVPQSLYLTADAEPRTTLATTNYVG | |
| TPSGSMVSSDVQLFNRSYWLQRCQGQNNGICWRNQLFITVGDNTRGTSLSISMKNNASTT | |
| YSNANFNDFLRHTEEFDLSFIVQLCKVKLTPENLAYIHTMDPNILEDWQLSVSQPPTNPL | |
| EDQYRFLGSSLAAKCPEQAPPEPQTDPYSQYKFWEVDLTERMSEQLDQFPLGRKFLYQSG | |
| MTQRTATSSTTKRKTVRVSTSAKRRRKA | |

[0157] TABLE 36

| | |
|---|---|
| cbe_252041 HPV 1a L2 | |
| Human Papillomavirus 1a L2 | |
| length = 507 | |
| MYRLRRKRAAPKDIYPSCKISNTCPPDIQNKIEHTTIADKILQYGSLGVFLGGLGIGTAR | SEQ ID NO: 27 |
| GSGGRIGYTPLGEGGGVRVATRPTPVRPTIPVETVGPSEIFPIDVVDPTGPAVIPLQDLG | |
| RDFPIPTVQVIAEIHPISDIPNIVASSTNEGESAILDVLRGNATIRTVSRTQYNNPSFTV | |
| ASTSNISAGEASTSDIVFVSNGSGDRVVGEDIPLVELNLGLETDTSSVVQETAFSSSTPI | |
| AERPSFRPSRFYNRRLYEQVQVQDPRFVEQPQSMVTFDNpAFEPELDEVSIIFQRDLDAL | |
| AQTPVPEFRDXIVYLSKPTFSREPGGRLRVSRLGKSSTRTRLGTAIGARTHFFYDLSSIA | |
| PEDSIELLPLGEHSQTTVISSNLGDTAFIQGETAEDDLEVISLETPQLYSEEELLDTNES | |
| VGENLQLTITNSEGEVSILDLTQSRVRPPFGTEDTSLHVYYPNSSKGTPIINPEESFTPL | |
| VIIALNNSTGDFELHPSLRKRRKRAYV | |

[0158] TABLE 37

| | |
|---|---|
| cbe_2685998 Prey2313 | |
| Homo sapiens, clone IMAGE: 3625550, mRNA, partial cds. | |
| length = 361 | |
| AICLDYFTDPVSIGCGHNFCRVCVTQLWGGEDEEDRDELDREEEEEDGEEEEVEAVGAGA | SEQ ID NO: 28 |
| GWDTPMRDEDYEGDMEEEVEEEEEGVFWTSGMSRSSWDNMDYVWEEEDEEEDLDYYLGDM | |
| EEEDLRGEDEEDEEEVLEEVEEEDLDPVTPLPPPPAPRRCFTCPQCRKSFPRRSFRPNLQ | |
| LANMVQVIRQMHPTPGRGSRVTDQGICPKHQEALKLFCEVDEEAICVVCRESRSHKQHSV | |
| VPLEEVVQEYKAKLQGHVEPLRKHLEAVQKMKAKEERRVTELKSQMKSELAAVASEFGRL | |
| TRFLAEEQAGLERRLREMHEAQLGRAGAAASRLAEQAAQLSRLLAEAQERSQQGGLRLLQ | |
| V | |

[0159] TABLE 38

| | |
|---|---|
| cbe_2826346 RPS10 | |
| ribosomal protein S10 | |
| length = 165 | |
| MLMPKKNRIAIYELLFKEGVMVAKKDVHMPKHPELADKNVPNLHVMKAMQSLKSRGYVKE | SEQ ID NO: 29 |
| QFAWRHFYWYLTNEGIQYLRDYLHLPPEIVPATLRRSRPETGRPRPKGLEGERPARLTRG | |
| EADRDTYRRSAVPPGADKKAEAGAGSATEFQFRGGFGRGRGQPPQ | |

[0160] TABLE 39

| | |
|---|---|
| cbe_2830508 Prey292051 | |
| Homo sapiens, clone MGC: 12344, | |
| mRNA, complete cds. | |
| length = 20 | |
| MQLKTLSLATPPRETAVINL | SEQ ID NO: 30 |

[0161] TABLE 40

| | |
|---|---|
| cbe_3001381 IRF1 | |
| interferon regulatory factor 1 | |
| length = 325 | |
| MPITRMRMRPWLEMQINSNQIPGLIWINKEEMIFQIPWKHAAKHGWDINKDACLFRSWAI | SEQ ID NO: 31 |
| HTGRYKAGEKEPDPKTWKANFRCAMNSLPDIEEVKDQSRNKGSSAVRVYRMLPPLTKNQR | |
| KERKSKSSRDAKSKAKRKSCGDSSPDTFSDGLSSSTLPDDHSSYTVPGYMQDLEVEQALT | |
| PALSPCAVSSTLPDWHIPVEVVPDSTSDLYNFQVSPMPSTSEATTDEDEEGKLPEDIMKL | |
| LEQSEWQPTNVDGKGYLLNEPGVQPTSVYGDFSCKEEPEIDSPGGDIGLSLQRVFTDLKN | |
| MDATWLDSLLTPVRLPSIQAIPCAP | |

[0162] TABLE 41

| | |
|---|---|
| cbe_3056756 KIAA0440 | |
| signal-induced proliferation-associated 1 like 1 | |
| length = 1804 | |
| MTSLKRSQTERPLATDRASVVGTDGTPKVHTDDFYMRRFRSQNGSLGSSVMAPVGPPRSE | SEQ ID NO: 32 |
| GSHHITSTPGVPKMGVRARIADWPPRKENIKESSRSSQEIETSSCLDSLSSKSSPVSQGS | |
| SVSLNSNDSAMLKSIQNTLKNKTRPSENMDSRFLMPEAYPSSPRKALRRIRQRSNSDITI | |
| SELDVDSFDECISPTYKTGPSLHREYGSTSSIDKQGTSGESFFDLLKGYKDDKSDRGPTP | |
| TKLSDFLITGGGKGSGFSLDVIDGPISQRENLRLFKEREKPLKRRSKSETGDSSIFRKLR | |
| NAKGEELGKSSDLEDNRSEDSVRPWTCPKCFAHYDVQSILFDLNEAIMNRHNVIKRRNTT | |
| TGASAAAVASLVSGPLSHSASFSSPMGSTEDLNSKGSLSMDQGDDKSNELVMSCPYFRNE | |
| IGGEGERKISLSKSNSGSFSGCESASFESTLSSHCTNAGVAVLEVPKENLVLHLDRVKRY | |
| IVEHVDLGAYYYRKFFYQKEHWNYFGADENLGPVAVSIRREKPDEMKENGSPYNYRIIFR | |
| TSELMTLRGSVLEDAIPSTAKHSTARGLPLKEVLEHVVPELNVQCLRLAFNTPKVTEQLM | |
| KLDEQGLNYQQKVGIMYCKAGQSTEEEMYNNESAGPAFEEFLQLLGERVRLKGFEKYRAQ | |
| LDTKTDSTGTHSLYTTYKDYEIMFHVSTMLPYTPNNKQQLLRKRHIGNDIVTIVFQEPGA | |
| QPFSPKNIRSHFQHVFVIVRVHNPCSDSVCYSVAVTRSRDVPSFGPPIPKGVTFPKSNVF | |
| RDFLIAKVINAENAAHKSEKFRAMATRTRQEYLKDLAEKNVTNTPIDPSGKFPFISLASK | |
| KKEKSKPYPGAELSSMGAIVWAVRAEDYNKAMELDCLLGISNEFIVLIEQETKSVVFNCS | |
| CRDVIGWTSTDTSLKIFYERGECVSVGSFINIEEIKEIVKRLQFVSKGCESVEMTLRRNG | |
| LGQLGFHVNYEGIVADVEPYGYAWQAGLRQGSRLVEICKVAVATLSHEQMIDLLRTSVTV | |
| KVVIIPPHDDCTPRRSCSETYRMPVMEYKMNEGVSYEFKFPFRNNNKWQRNASKGPHSPQ | |
| VPSQVQSPMTSRLNAGKGDGKMPPPERAANIPRSISSDGRPLERRLSPGSDIYVTVSSMA | |
| LARSQCRNSPSNLSSSSDTGSVGGTYRQKSMPEGFGVSRRSPASIDRQNTQSDIGGSGKS | |
| TPSWQRSEDSIADQMAYSYRGPQDFNSFVLEQHEYTEPTCHLPAVSKVLPAFRESPSGRL | |
| MRQDPVVHLSPNKQGHSDSHYSSHSSSNTLSSNASSAHSDEKWYDGDRTESELNSYNYLQ | |
| GTSADSGIDTTSYGPSHGSTASLGAATSSPRSGPGKEKVAPLWHSSSEVISMADRTLETE | |
| SHGLDRKTESSLSLDIHSKSQAGSTPLTRENSTFSINDAASHTSTMSSRHSASPVVFTSA | |
| RSSPKEELHPAAPSQLAPSFSSSSSSSSGPRSFYPRQGATSKYLIGWKKPEGTINSVGFM | |
| DTRKRHQSDGNEIAHTRLRASTRDLRASPKPTSKSTIEEDLKKLIDLESPTPESQKSFKF | |
| HALSSPQSPFPSTPTSRRALHRTLSDESIYNSQREHFFTSRASLLDQALPNDVLFSSTYP | |
| SLPKSLPLRRPSYTLGMKSLHGEFSASDSSLTDIQETRRQPMPDPGLMPLPDTAADLDWS | |
| NLVDAAKAYEVQRASFFAASDENHRPLSAASNSDQLEDQALAQMKPYSSSKDSSPTLASK | |
| VDQLEGMLKMLREDLKKEKEDKAHLQAEVQHLREDNLRLQEESQNASDKLKKFTEWVFNT | |
| IDMS | |

[0163] TABLE 42

| | |
|---|---|
| cbe_3340492 TRIP | |
| TRAF interacting protein | |
| length = 469 | |
| MPIRALCTICSDFFDHSRDVAAIHCGHTFHLQCLIQSFETAPSRTCPQCRIQVGKRTIIN | SEQ ID NO: 33 |
| KLFFDLAQEEENVLDREFLKNELDNVRAQLSQKDKEKRDSQVIIDTLRDTLEERNATVVS | |
| LQQALGKAEMLCSTLKKQMKYLEQQQDETKQAQEEAGRLRSKMKTMEQIELLLQSQLPEV | |
| EEMIRDMGVGQSAVEQLAVYCVSLKKEYENLKEARKASGEVADKLRKDLFSSRSKLQTVY | |
| SELDQAKLELKSAQKDLQSADKEIMSLKKKLTMLQETLNLPPVASETVDRLVLESPAPVE | |
| VNLKLRRPSFRDDIDLNATFDVDTPPARPSSSQHGYYEKLCLEKSHSPIQDVPKKICKGP | |
| RKESQLSLGGQSCAGEPDEELVGAFPIFVRNAILGQKQPKRPRSESSCSKDVVRTGFDGL | |
| GGRTKFIQPTDTVMIRPLPVKPKTKVKQRVRVKTVPSLFQAKLDTFLWS | |

[0164] TABLE 43

| | |
|---|---|
| cbe_3345510 COX6C | |
| cytochrome c oxidase subunit VIc | |
| length = 75 | |
| MAPEVLPKPRMRGLLARRLRNHMAVAFVLSLGVAALYKFRVADQRKKAYADFYRNYDVMK | SEQ ID NO: 34 |
| DFEEMRKAGIFQSVK | |

[0165] TABLE 44

| | |
|---|---|
| cbe_3454406 gbh_af252829 | |
| Homo sapiens chromosome 8 clone BAC 495D4 map 8q24, *** SEQUENCING | |
| length = 338 | |
| MGKKQNRKTGNSKTQSTSPPPKERSSSPATDQSWMENDFDELREEGFRRSNYSELREDIQ | SEQ ID NO: 35 |
| TKGKEVENFEKNLEECITRITNTEKCLKELMELKTKARELREECRSLRSQCDQLEERVSA | |
| MEDEMNEMKQEGKFREKRIKRNEQSLQEIWDYVKRPNLRLIGVPESDAENGTKLENTLQD | |
| IIQETFPNLARQANVQIQEIQRTPQRYSSRRATPRHIIVRFTKVEMKEKMLRAAREKGRV | |
| TLKGKPIRLTADLSAETLQARREWCPILNILKEKNFQPRISYPAKLSFISEGEIKYFTDK | |
| QMLTDFVTSRPALKELLKEALNMERNNRYQPLQNHAKM | |

[0166] TABLE 45

| | |
|---|---|
| cbe_3461331 MET | |
| met proto-oncogene (hepatocyte growth factor receptor) | |
| length = 1408 | |
| MKAPAVLAPGILVLLFTLVQRSNGECKEALAKSEMNVNNKYQLPNFTAETPIQNVILEEN | SEQ ID NO: 36 |
| HIFLGATNYIYVLNEEDLQKVAEYKTGPVLEHPDCFPCQDCSSKANLSGGVWKDNINMAL | |
| VVDTYYDDQLISCGSVNRGTCQRHVFPHNHTALIQSEVHCIFSPQIEEPSQCPDCVVSAW | |
| GAKVLSSVKDRFINFFVGNTINSSYFPDHPLHSISVRRLKETKDGFNFLTDQSYIDVLPE | |
| FRDSYPIKYVHAFESNNFIYFLTVQRETLDAQTFHTRIIRFCSINSGLHSYMEMPLECIL | |
| TEKRKKRSTKKEVFNILQAAYVSKPGAQLARQIGASLNDDILFGVFAQSKPDSAEFMDRS | |
| ANCAFPIKYVNDFFNKIVNKNNVRCLQHFYGPNHEHCFNRTLLRNSSGCEARRDEYRTEF | |
| TTALQRVDLFMGQFSEVLLTSISTEIKGDLTIANLGTSEGRFMQVVVSRSGPSTPHVNFL | |
| LDSHPVSPEVIVEHTLNQNGYTLVITGKKITKIPLNGLGCRHFQSCSQCLSAPPFVQCGW | |
| CHDKCVRSEECLSGTWTQQICLPAIYKVFPNSAPLEGGTRLTICGWDFGFRRNNKFDLKK | |
| TRVLLGNESCTLTLSESTMNTLKCTVGPAMNKHFNMSIIISNGHGTTQYSTFSYVDPVIT | |
| SISPKYGPNAGGTLLTLTGNYLNSGNSRHISIGGKTCTLKSVSNSILECYTPAQTISTEF | |
| AVKLKIDLANRETSIFSYREDPIVYEIHPTKSFISTWWKEPLNIVSFLFCFASGGSTITG | |
| VGKNLNSVSVPRMVINVHEAGRNFTVACQHRSNSEIICCTTPSLQQLNLQLPLKTKAFFM | |
| LDGILSKYFDLIYVHNPVFKPFEKPVMISMGNENVLEIKGNDIDPEAVKGEVLKVGNKSC | |
| ENIHLHSEAVLCTVPNDLLKLNSELNIEWKQAISSTVLGKVIVQPDQNFTGLIAGWSIS | |
| TALLLLLGFFLWLKKRKQIKDLGSELVRYDARVHTPHLDRLVSARSVSPTTEMVSNESVD | |
| YRATFPEDQFPNSSQNGSCRQVQYPLTDMSPILTSGDSDISSPLLQNTVHIDLSALNPEL | |
| VQAVQHVVICPSSLIVHFNEVICRGHFGCVYHGTLLDNDGKKIHCAVKSLNRITDICEVS | |
| QFLTEGIIMKDPSHPNVLSLLGICLRSEGSPLVVLPYMKHGDLRNFIRNETHNPTVKDLI | |
| GFGLQVAKAMKYLASKKFVHRDLAARNCMLDEKFTVKVADFGLARDMYDKEYYSVHNKTG | |
| AKLPVKWMALESLQTQKFTTKSDVWSFGVVLWELMTRGAPPYPDVNTFDITVYLLQGRRL | |
| LQPEYCPDPLYEVMLKCWHPKAEMRPSFSELVSRISAIFSTFIGEHYVHVNATYVNVKCV | |
| APYPSLLSSEDNADDEVDTRPASFWETS | |

[0167] TABLE 46

| | |
|---|---|
| cbe_3473488 gbh_al121903 | |
| Human DNA sequence from clone RP1-155G6 on chromosome 20 Contains | |
| length = 641 | |
| VGCNPNEDVAIFAVDSLRQLSMKFLEKGELANFRFQKDFLRPFEHIMKKNRSPTIRDMAI | SEQ ID NO: 37 |
| RCIAQMVNSQAANIRSGWKNIFAVFHQAASDHDGNIVELAFQTTCHIVTTIFQHHFPAAI | |
| DSFQDAVKCLSEFACNAAFPDTSMEAIRLIRFCGKYVSERPRVLQEYTSDDMNVAPGDRV | |
| WVRGWFPILFELSCIINRCKLDVRTRGLTVMFEIMKSYGHTFEKHWWQDLFRIVFRIFDN | |
| MKLPEQLSEKSEWMTTTCNHALYAICDVFTQFYEALNEVLLSDVFAQLQWCVKQDNEQLA | |
| RSGTNCLENLVISNGEKFSPEVWDETCNCMLDIFKTTIPHVLLTWRPVGMEEDSSEKHLD | |
| VDLDRQSLSSIDKNPSERGQSQLSNPTDDSWKGRPYANQKLFASLLIKCVVQLELIQTID | |
| NIVFYPATSKKEDAEHMVAAQQDTLDADIHIETEDQGMYKYMSSQHLFKLLDCLQESHSF | |
| SKAFNSNYEQRTVLWRAGFKGKSKPNLLKQETSSLACCLRILFRNYVDENRRDSWEEIQQ | |
| RLLTVCSEALAYFITVNSESHREAWTSLLLLLLTKTLKINDEKFKAHASMYYPYLCEIMQ | |
| FDLIPELRAVLRKFFLRIGVVYKIWIPEEPSQVPAALSPVW | |

[0168] TABLE 47

| | |
|---|---|
| cbe_3474077 KRT4 | |
| keratin 4 | |
| length = 534 | |
| MIARQQCVRGGPRGFSCGSAIVGGGKRGAFSSVSMSGGAGRCSSGGFGSRSLYNLRGNKS | SEQ ID NO: 38 |
| ISMSVAGSRQGACFGGAGGFGTGGFGAGGFGAGFGTGGFGGGFGGSFSGKGGPGFPVCPA | |
| GGIQEVTINQSLLTPLHVEIDPEIQKVRTEEREQIKLLNNKFASFIDKVQFLEQQNKVLE | |
| TKWNLLQQQTTTTSSKNLEPLFETYLSVLRKQLDTLGNDKGRLQSELKTMQDSVEDFKTK | |
| YEEEINKRTAAENDFVVLKKDVDAAYLNKVELEAKVDSLNDEINFLKVLYDAELSQMQTH | |
| VSDTSVVLSMDNNRNLDLDSIIAEVRAQYEEIAQRSKAEAEALYQTKVQQLQISVDQHGD | |
| NLKNTKSEIAELNRMIQRLRAEIENIKKQCQTLQVSVADAEQRGENALKDAHSKRVELEA | |
| ALQQAKEELARMLREYQELMSVKLALDIEIATYRKLLEGEEYRMSGECQSAVSISVVSGS | |
| TSTGGISGGLGSGSGFGLSSGFGSGSGSGFGFGGSVSGSSSSKIISTTTLNKRR | |

[0169] TABLE 48

| | |
|---|---|
| cbe_3563252 LOC91689 | |
| hypothetical gene supported by AL449243 | |
| length = 107 | |
| MASGAARWLVLAPVRSGALRSGPSLRKDGDVSAAWSGSGRSLVPSGSVIVTRSGAILPKP | SEQ ID NO: 39 |
| VKMSFGLLRVFSIVIPFLYVGTLISKNFAALLEEHDIFVPEDDDDDD | |

[0170] TABLE 49

| | |
|---|---|
| cbe_3575702 SUI1 | |
| putative translation initiation factor | |
| length = 113 | |
| MSAIQNLHSFDPFADASKGDDLLPAGTEDYIHIRIQQRNGRKTLTTVQGIADDYDKKKLV | SEQ ID NO: 40 |
| KAFKKKFACNGTVIEHPEYGEVIQLQGDQRKNICQFLVEIGLAKDDQLKVHGF | |

[0171] TABLE 50

cbe_3580897 HSPA5
heat shock 70 kDa protein 5 (glucose-regulated protein, 78 kDa)
length = 654

| | |
|---|---|
| MKLSLVAAMLLLLSAARAEEEDKKEDVGTVVGIDLGTTYSCVGVFKNGRVEIIANDQGNR | SEQ ID NO:41 |
| ITPSYVAFTPEGERLIGDAAKNQLTSNPENTVFDAKRLIGRTWNDPSVQQDIKFLPFKVV | |
| EKKTKPYIQVDIGGGQTKTFAPEEISAMVLTKMKETAEAYLGKKVTHAVVTVPAYFNDAQ | |
| RQATKDAGTIAGLNVMRIINEPTAAAIAYGLDKREGEKNILVFDLGGGTFDVSLLTIDNG | |
| VFEVVATNGDTHLGGEDFDQRVMEHFIKLYKKKTGKDVRKDNRAVQKLRREVEKAKRALS | |
| SQHQARIEIESFYEGEDFSETLTRAKFEELNMDLFRSTMKPVQKVLEDSDLKKSDIDEIV | |
| LVGGSTRIPKIQQLVKEFFNGKEPSRGINPDEAVAYGAAVQAGVLSGDQDTGDLVLLDVC | |
| PLTLGIETVGGVMTKLIPRNTVVPTKKSQIFSTASDNQPTVTIKVYEGERPLTKDNHLLG | |
| TFDLTGIPPAPRGVPQIEVTFEIDVNGILRVTAEDKGTGNKNKITITNDQNRLTPEEIER | |
| MVNDAEKFAEEDKKLKERIDTRNELESYAYSLKNQIGDKEKLGGKLSSEDKETMEKAVEE | |
| KIEWLESHQDADIEDFKAKKKELEEIVQPIISKLYGSAGPPPTGEEDTAEKDEL | |

[0172] TABLE 51

cbe_3583511 MGC3222
hypothetical protein MGC3222
length = 255

| | |
|---|---|
| VVSPDSIHSVAPENEGRLVHIIGALRTSKLLSDPNYGVHLPAVKLRRHVEMYQWVETEES | SEQ ID NO:42 |
| REYTEDGQVKKETRYSYNTEWRSEIINSKNFDREIGHNNPSAMAVESFTATAPFVQIGRF | |
| FLSSGLIDKVDNFKSLSLSKLEDPHVDIIRRGDFFYHSENPKYPEVGDLRVSFSYAGLSG | |
| DDPDLGPAHVVTVIARQRGDQLVPFSTKSGDTLLLLHHGDFSAEVSAVPYSYGGGTSMSF | |
| LPSSGYLIRSHYQGS | |

[0173] TABLE 52

cbe_3590661 NUP214
nucleoporin 214 kDa
length = 2127

| | |
|---|---|
| MRAAGAEGRKFAVERPGFRGQGRGRQRWLLRHTEGGAMGDEMDAMIPEREMKDFQFRALK | SEQ ID NO:43 |
| KVRIFDSPEELPKERSSLLAVSNKYGLVFAGGASGLQIFPTKNLLIQNKPGDDPNKIVDK | |
| VQGLLVPMKFPIHHLALSCDNLTLSACMMSSEYGSIIAFFDVRTFSNEAKQQKRPFAYHK | |
| LLKDAGGMVIDMKWNPTVPSMVAVCLADGSIAVLQVTETVKVCATLPSTVAVTSVCWSPK | |
| GKQLAVGKQNGTVVQYLPTLQEKKVIPCPPFYESDHPVRVLDVLWIGTYVFAIVYAAADG | |
| TLETSPDVVMALLPKKEEKHPEIFVNFMEPCYGSCTERQHHYYLSYIEEWDLVLAASAAS | |
| TEVSILARQSDQINWESWLLEDSSRAELPVTDKSDDSLPMGVVVDYTNQVEITISDEKTL | |
| PPAPVLMLLSTDGVLCPFYMINQNPGVKSLIKTPERLSLEGERQPKSPGSTPTTPTSSQA | |
| PQKLDASAAAAPASLPPSSPAAPIATFSLLPAGGAPTVFSFGSSSLKSSATVTGEPPSYS | |
| SGSDSSKAAPGPGPSTFSFVPPSKASLAPTPAASPVAPSAASFSFGSSGFKPTLESTPVP | |
| SVSAPNIAMKPSFPPSTSAVKVNLSEKFTAAATSTPVSSSQSAPPMSPFSSASKPAASGP | |
| LSHPTPLSAPPSSVPLKSSVLPSPSGRSAQGSSSPVPSMVQKSPRITPPAAKPGSPQAKS | |
| LQPAVAEKQGHQWKDSDPVMAGIGEEIAHFQKELEELKARTSKACFQVGTSEEMKMLRTE | |
| SDDLHTFLLEIKETTESLHGDISSLKTTLLEGFAGVEEAREQNERNRDSGYLHLLYKRPL | |
| DPKSEAQLQEIRRLHQYVKFAVQDVNDVLDLEWDQHLEQKKKQRHLLVPERETLFNTLAN | |
| NREIINQQRKRLNHLVDSLQQLRLYKQTSLWSLSSAVPSQSSIHSFDSDLESLCNALLKT | |
| TIESHTKSLPKVPAKLSPMKQAQLRNFLAKRKTPPVRSTAPASLSRSAFLSQRYYEDLDE | |
| VSSTSSVSQSLESEDARTSCKDDEAVVQAPRHAPVVRTPSIQPSLLPHAAPFAKSHLVHG | |
| SSPGVMGTSVATSASKIIPQGADSTMLATKTVKHGAPSPSHPISAPQAAAAAALRRQMAS | |
| QAPAVNTLTESTLKNVPQVVNVQELKNNPATPSTAMGSSVPYSTAKTPHPVLTPVAANQA | |
| KQGSLINSLKPSGPTPASGQLSSGDKASGTAKIETAVTSTPSASGQFSKPFSFSPSGTGF | |
| NFGIITPTPSSNFTAAQGATPSTKESSQPDAFSSGGGSKPSYEAIPESSPPSGITSASNT | |
| TPGEPAASSSRPVAPSGTALSTTSSKLETPPSKLGELLFPSSLAGETLGSFSGLRVGQAD | |
| DSTKPTNKASSTSLTSTQPTKTSGVPSGFNFTAPPVLGKHTEPPVTSSATTTSVAPPAAT | |
| STSSTAVFGSLPVTSAGSSGVISFGGTSLSAGKTSFSFGSQQTNSTVPPSAPPPTTAATP | |
| LPTSFPTLSFGSLLSSATTPSLPMSAGRSTEEATSSALPEKPGDSEVSASAASLLEEQQS | |
| AQLPQAPPQTSDSVKKEPVLAQPAVSNSGTAASSTSLVALSAEATPATTGVPDARTEAVP | |
| PASSFSVPGQTAVTAAAISSAGPVAVETSSTPIASSTTSIVAPGPSAEAAAFGTVTSGSS | |
| VFAQPPAASSSSAFNQLTNNTATAPSATPVFGQVAASTAPSLFGQQTGSTASTAAATPQV | |
| SSSGFSSPAFGTTAPGVFGQTTFGQASVFGQSASSAASVFSFSQPGFSSVPAFGQPASST | |
| PTSTSGSVFGAASSTSSSSSFSFGQSSPNTGGGLFGQSNAPAFGQSPGFCQGGSVFGGTS | |
| AATTTAATSGFSFCQASGFGSSNTGSVFGQAASTGGIVFGQQSSSSSGSVFGSGNTGRGG | |
| GFFSGLGGKPSQDAANKNPFSSASGGFGSTATSNTSNLFGNSGAKTFGGFASSSFGEQKP | |
| TGTFSSGGGSVASQGFGFSSPNKTGGFGAAPVFGSPPTFGGSPGFGGVPAFGSAPAFTSP | |
| LGSTGGKVFGEGTAAASAGGFGFGSSSNTTSFGTLASQNAPTFGSLSQQTSGFGTQSSGF | |
| SGFGSGTGGFSFGSNNSSVQGFGGWRS | |

[0174] TABLE 53

cbe_3606990 Prey1053670
Homo sapiens, Similar to CG5604 gene product, clone MGC:11330, mRNA,
complete cds.
length = 81

| | |
|---|---|
| MSSDERKAFLQFTTGCSTLPPGGLANLHPRLTVVRKVDATDASYPSVNTCVHYLKLPEYS | SEQ ID NO:44 |
| SEEIMRERLLAATMEKGFHLN | |

[0175] TABLE 54

cbe_3621798 XPO1
exportin 1 (CRM1 homolog, yeast)
length = 1071

| | |
|---|---|
| MPAIMTMLADHAARQLLDFSQKLDINLLDNVVNCLYHGEGAQQRMAQEVLTHLKEHPDAW | SEQ ID NO:45 |
| TRVDTILEFSQNMNTKYYGLQILENVIKTRWKILPRNQCEGIKKYVVGLIIKTSSDPTCV | |
| EKEKVYIGKLNMILVQILKQEWPKHWPTFISDIVGASRTSESLCQNNMVILKLLSEEVFD | |
| FSSGQITQVKSKHLKDSMCNEFSQIFQLCQFVMENSQNAPLVHATLETLLRFLNWIPLGY | |
| IFETKLISTLIYKFLNVPMFRNVSLKCLTEIAGVSVSQYEEQFVTLFTLTMMQLKQMLPL | |
| NTNIRLAYSNGKDDEQNFIQNLSLFLCTFLKEHDQLIEKRLNLRETLMEALHYMLLVSEV | |
| EETEIFKICLEYWNHLAAELYRESPFSTSASPLLSGSQHFDVPPRRQLYLPMLFKVRLLM | |
| VSRMAKPEEVLVVENDQGEVVREFMKDTDSINLYKNMRETLVYLTHLDYVDTERIMTEKL | |
| HNQVNGTEWSWKNLNTLCWAIGSISGAMHEEDEKRFLVTVIKDLLGLCEQKRGKDNKAII | |
| ASNIMYIVGQYPRFLRAHWKFLKTVVNKLFEFMHETHDGVQDMACDTFIKIAQKCRRHFV | |
| QVQVGEVMPFIDEILNNINTIICDLQPQQVHTFYEAVGYMIGAQTDQTVQEHLIEKYMLL | |
| PNQVWDSIIQQATKNVDILKDPETVKQLGSILKTNVRACKAVGHPFVIQLGRIYLDMLNV | |
| YKCLSENISAAIQANGEMVTKQPLIRSMRTVKRETLKLISGWVSRSNDPQMVAENFVPPL | |
| LDAVLIDYQRNVPAAREPEVLSTMAIIVNKLGGHITAEIPQIFDAVFECTLNMINKDFEE | |
| YPEHRTNFFLLLQAVNSHCFPAFLAIPPTQFKLVLDSIIWAFKHTMRNVADTGLQILFTL | |
| LQNVAQEEAAAQSFYQTYFCDILQHIFSVVTDTSHTAGLTMHASILAYMFNLVEEGKIST | |
| SLNPGNPVNNQIFLQEYVANLLKSAFPHLQDAQVKLFVTGLFSLNQDIPAFKEHLRDFLV | |
| QIKEFAGEDTSDLFLEEREIALRQADEEKHKRQMSVPGIFNPHEIPEEMCD | |

[0176] TABLE 55

cbe_3621899 PCNP
PEST-containing nuclear protein
length = 178

| | |
|---|---|
| MADGKAGDEKPEKSQRAGAAGGPEEEAEKPVKTKTVSSSNGGESSSRSAEKRSAEEEAAD | SEQ ID NO:46 |
| LPTKPTKISKFGFAIGSQTTKKASAISIKLGSSKPKETVPTLAPKTLSVAAAFNEDEDSE | |
| PEEMPPEAKMRMKNIGRDTPTSAGPNSFNKGKHGFSDNQKLWERNIKSHLGNVHDQDN | |

[0177] TABLE 56

cbe_3625721 EIF2B2
eukaryotic translation initiation factor 2B, subunit 2 beta, 39 kDa
length = 351

| | |
|---|---|
| MPGSAAKGSELSERIESFVETLKRGGGPRSSEEMARETLGLLRQIITDHRWSNAGELMEL | SEQ ID NO:47 |
| IRREGRRMTAAQPSETTVGNMVRRVLKIIREEYGRLHGRSDESDQQESLHKLLTSGGLNE | |
| DFSFHYAQLQSNIIEAINELLVELEGTMENIAAQALEHIHSNEVIMTIGFSRTVEAFLKE | |
| AARKRKFHVIVAECAPFCQGHEMAVNLSKAGIETTVMTDAAIFAVMSRVNKVIIGTKTIL | |
| ANGALRAVTGTHTLALAAKHHSTPLIVCAPMFKLSPQFPNEEDSFHKFVAPEEVLPFTEG | |
| DILEKVSVHCPVFDYVPPELITLFISNIGGNAPSYIYRLMSELYHPDDHVL | |

[0178] TABLE 57

| | |
|---|---|
| cbe_3641816 ANKH | a |

nkylosis, progressive homolog (mouse)
length = 492

| | |
|---|---|
| MVKFPALTHYWPLIRFLVPLGITNIAIDFGEQALNRGIAAVKEDAVEMLASYGLAYSLMK | SEQ ID NO:48 |
| FFTGPMSDFKNVGLVFVNSKRDRTKAVLCMVVAGAIAAVFHTLIAYSDLGYYIINKLHHV | |
| DESVGSKTRRAFLYLAAFPFMDAMAWTHAGILLKHKYSFLVGCASISDVIAQVVFVAILL | |
| HSHLECREPLLIPILSLYMGALVRCTTLCLGYYKNIHDIIPDRSGPELGGDATIRKMLSF | |
| WWPLALILATQRISRPIVNLFVSRDLGGSSAATEAVAILTATYPVGHMPYGWLTEIRAVY | |
| PAFDKNNPSNKLVSTSNTVTAAHIKKFTFVCMALSLTLCFVMFWTPNVSEKILIDIIGVD | |
| FAFAELCVVPLRIFSFFPVPVTVRAHLTGWLMTLKKTFVLAPSSVLRIIVLIASLVVLPY | |
| LGVHGATLGVGSLLAGFVGESTMVAIAACYVYRKQKKKMENESATEGEDSAMTDMPPTEE | |
| VTDIVEMREENE | |

[0179] TABLE 58

cbe_3643627 DKFZP434I1735
DKFZP434I1735 protein
length = 1590

| | |
|---|---|
| VILHPSISVRLAAAWCLHCIAVALPSYLTPLLDRCLERLTGHKSSPEAVTGFSFAVAALL | SEQ ID NO:49 |
| GAVKHCPLGIPHGKGKIIMTLAEDLLCSAAQNSRLSAQRTQAGWLLISALMTLGPAVVSH | |
| HLARVLLLWKCVFPASPKDLETEKSRGDSFTWQVTLEGRAGALCAIKSFVSHCGDLLTEE | |
| VTQRLLPPLPCAVDLLTQLSSILKMYGSPLKTPSVVYRQRLYELLILLPPETYEGNLCAI | |
| LRELAADLTAPDIQVAASTFLLPPLCHQDDLLILSPFLQETDHRFIEEQLLLGNGVACGS | |
| LEYDPYSIYEKDVEGDSVPKPLPPALSVISSASKLFGVVCAHVGETQRLLILEQLLDSIK | |
| HTKGARQQVVQLHVVSSVSSFLKYVAGSKGCLGPEEMKRFALTLVMGALESPNPLLRCAA | |
| AESWARLAQMVDDGAFTAGLAQVSFDKLKSARDVVTRTGHSLALGSLHRYLGGISSSQHL | |
| NSCIGILYTLAQDSTSPDVQTWALHSLSLIIDSAGPLYYVHVEPTLSLIIMLLLNVPPTH | |
| AEVHQSLGRCLNALITTLGPELQGNSTSISTLRTSCLLGCAVMQDNPDCLVQAQAISCLQ | |
| QLHMFAPRHVNLSSLVSCLCVNLCSPYLLLRRAVLACLRQLVQREAAEVSEHAVMLAKDS | |
| REELTPDANIREVGLEGALLILLDKETDERLCHDIKETLNYMLTSMAVEKLSLWLKLCKD | |
| VLAASADFTAVTCVDTMQEEEGDKGDDASVLTTRRDEKSHPFTNPRWATRVFAAECVCRI | |
| INQCENANSAHFDIALAQEMKKRDSRNDFLVLHLADLIRMAFMAATDHSDQLRLSGLEML | |
| LVVIRRFATVPEPEFPGHVILEQYQANVGAALRPAFTSETPPDVTAKACQVCSAWIASGV | |
| VSDLNDLRRVHQLLVSSLTKIQAGKEALSHLYNESASTMEILAVLKAWAEVYIIAVQRHK | |
| NHRQPLKTTTCLEDGIRNGSCSSDGLLDLVYADLGTLSRLWLAALQDFALLTLPSEFASQ | |
| LPAEGGAFYTAETSENAKLHYYNSWALILHATALWLTSTGFVVADPDEGASNLSRPVTPT | |
| SMCQGSSSGATIKSPEDVYTDRFHLILGISVEFLCSLRSDATMESITACLHALQALLDVP | |
| WPRSKIGSDQDLGIELLNVLHRVILTRESPSIQLASLEVVRQIICAAQEHVKEKRRSAEV | |
| DDGAAEKETLPEFGEGKDTGGLVPGKSLVFATLELCVCILVRQLPELNPKLTGSPGVKAT | |
| KPQILLEDGSRLVSAALVILSELPAVCSPEGSISILPTILYLTIGVLRETAVKLPGGQLS | |
| STVAASLQALKGILSSPMARAEKSRTAWTDLLRSALTTILDCWDPVDETHQELDEVSLLT | |
| AITVFILSTSPEVTTIPCLQKRCIDKFKATLEIKDPVVQIKTYQLLHSIFQYPNPAVSYP | |
| YIYSLASCIMEKLQEIDKRKPENTAELEIFQEGIKVLETLVTVAEEHHRAQLVACLLPIL | |
| ISFLLDENSLGSATSIMRNLHDFALQNLMQIGPQYSSVFKSLVASSPALKARLEAAIKGN | |
| QESVKVKIPTSKYTKSPGKNSSIQLKTSFL | |

[0180] TABLE 59

cbe_3663966 KIAA1389
KIAA1389 protein
lenqth = 1514

| | |
|---|---|
| FSTRYPLSIANYDHKAMVPFGFPEFFRCDPAISPSLHAAAQISRGEFVRISGLDYVDSAL | SEQ ID NO:50 |
| LMGRDRDKPFKRRLKSESVETSLFRKLRTVKSEHETFKFTSELEESRLERGIRPWNCQRC | |
| FAHYDVQSILFNINEAMATRANVGKRKNITTGASAASQTQMPTGQTGNCESPLGSKEDLN | |
| SKENLDADEGDGKSNDLVLSCPYFRNETGGEGDRRIALSRANSSSFSSGESCSFESSLSS | |
| HCTNAGVSVLEVPRENQPIHREKVKRYIIEHIDLGAYYYRKFFYGKEHQNYFGIDENLGP | |
| VAVSIRREKVEDAKEKEGSQFNYRVAFRTSELTTLRGAILEDAIPSTARHGTARGLPLKE | |
| VLEYVIPELSIQCLRQASNSPKVSEQLLKLDEQGLSFQHKIGILYCKAGQSTEEEMYNNE | |
| TAGPAFEEFLDLLGQRVRLKGFSKYRAQLDNKTDSTGTHSLYTTYKDYELMFHVSTLLPY | |
| MPNNRQQLLRKRHIGNDIVTIVFQEPGALPFTPKSIRSHFQHVFVIVKVHNPCTENVCYS | |
| VGVSRSKDVPPFGPPIPKGVTFPKSAVFRDFLLAKVINAENAAHKSEKFRAMATRTRQEY | |
| LKDLAENFVTTATVDTSVKFSFITLGAKKKEKVKPRKDAHLFSIGAIMWHVIARDFGQSA | |
| DIECLLGISNEFIMLIEKDSKNVVFNCSCRDVIGWTSGLVSIKVFYERGECVLLSSVDNC | |
| AEDIREIVQRLVIVTRGCETVEMTLRRNGLGQLGFHVNFEGIVADVEPFGFAWKAGLRQG | |
| SRLVEICKVAVATLTHEQMIDLLRTSVTVKVVIIQPHDDGSPRRGCSELCRIPMVEYKLD | |
| SEGTPCEYKTPFRRNTTWHRVPTPALQPLSRASPIPGTPDRLPCQQLLQQAQAAIPRSTS | |
| FDRKLPDGTRSSPSNQSSSSDPGPGGSGPWRPQVGYDGCQSPLLLEHQGSGPLECDGARE | |
| REDTMEASRHPETKWHGPPSKVLGSYKERALQKDGSCKDSPNKLSHIGDKSCSSHSSSNT | |
| LSSNTSSNSDDKHFGSGDLMDPELLGLTYIKGASTDSGIDTAPCMPATILGPVHLAGSRS | |
| LIHSRAEQWADAADVSGPDDEPAKLYSVHGYASAISAGSAAEGSMGDLSEISSHSSGSHH | |
| SGSPSAHCSKSSGSLDSSKVYIVSHSSGQQVPGSMSKPYHRQGAVNKYVIGWKKSEGSPP | |
| PEEPEVTECPGMYSEMDVMSTATQHQTVVGDAVAETQHVLSKEDFLKLMLPDSPLVEEGR | |
| RKFSFYGNLSPRRSLYRTLSDESICSNRRGSSFGSSRSSVLDQALPNDILFSTTPPYHST | |
| LPPRAHPAPSMGSLRNEFWFSDGSLSDKSKCADPGLMPLPDTATGLDWTHLVDAARAFEG | |
| LDSDEELGLLCHHTSYLDQRVASFCTLTDMQHGQDLEGAQELPLCVDPGSGKEFMDTTGE | |
| RSPSPLTGKVNQLELILRQLQTDLRKEKQDKAVLQAEVQHLRQDNMRLQEESQTATAQLR | |
| KFTEWFFTTIDKKS | |

[0181] TABLE 60

| | |
|---|---|
| cbe_3665307 HK1 | |
| hexokinase 1 | |
| length = 905 | |
| MAKRALRDFIDKYLYAMRLSDETLIDIMTRFRKEMKNGLSRDFNPTATVKMLPTFVRSIP | SEQ ID NO: 51 |
| DGSEKGDFIALDLGGSSFRILRVQVNHEKNQNVHMESEVYDTPENIVHGSGSQLFDHVAE | |
| CLGDFMEKRKIKDKKLPVGFTFSFPCQQSKIDEAILITWTKRFKASGVEGADVVKLLNKA | |
| IKKRGDYDANIVAVVNDTVGTMMTCGYDDQHCEVGLIIGTGTNACYMEELRHIDLVEGDE | |
| GRMCINTEWGAFGDDGSLEDIRTEFDREIDRGSLNPGKQLFEKMVSGMYLGELVRLILVK | |
| MAKEGLLFEGRITPELLTRGKFNTSDVSAIEKNKEGLHNAKEILTRLGVEPSDDDCVSVQ | |
| HVCTIVSFRSANLVAATLGAILNRLRDNKGTPRLRTTVGVDGSLYKTHPQYSRRFHKTLR | |
| RLVPDSDVRFLLSESGSGKGAAMVTAVAYRLAEQHRQIEETLAHFHLTKDMLLEVKKRMR | |
| AEMELGLRKQTHNNAVVKMLPSFVRRTPDGTENGDFLALDLGGTNFRVLLVKIRSGKKRT | |
| VEMHNKIYAIPIEIMQGTGEELFDHIVSCISDFLDYMGIKGPRMPLGFTFSFPCQQTSLD | |
| AGILITWTKGFKATDCVGHDVVTLLRDAIKRREEFDLDVVAVVNDTVGTMMTCAYEEPTC | |
| EVGLIVGTGSNACYNEEMKNVEMVEGDQGQMCINMEWGAFGDNGCLDDIRTHYDRLVDEY | |
| SLNAGKQRYEKNISGMYLGEIVRNILIDFTKKGFLFRGQISETLKTRGIFETKFLSQIES | |
| DRLALLQVRAILQQLGLNSTCDDSILVKTVCGVVSRRAAQLCGAGMAAVVDKIRENRGLD | |
| RLNVTVGVDGTLYKLHPHFSRIMHQTVKELSPKCNVSFLLSEDGSGKGAALITAVGVRLR | |
| TEASS | |

[0182] TABLE 61

| | |
|---|---|
| cbe_3670766 ACTC | |
| actin, alpha, cardiac muscle | |
| length = 377 | |
| MCDDEETTALVCDNGSGLVKACFAGDDAPRAVFPSIVGRPRHQGVMVGMGQKDSYVGDEA | SEQ ID NO: 52 |
| QSKRGILTLKYPIEHGIITNWDDMEKIWHHTFYNELRVAPEEHPTLLTEAPLNPKANREK | |
| MTQIMFETFNVPAMYVAIQAVLSLYASGRTTGIVLDSGDGVTHNVPIYEGYALPHAIMRL | |
| DLAGRDLTDYLMKILTERGYSFVTTAEREIVRDIKEKLCYVALDFENEMATAASSSSLEK | |
| SYELPDGQVITIGNERFRCPETLFQPSFIGMESAGIHETTYNSIMKCDIDIRKDLYANNV | |
| LSGGTTMYPGIADRMQKEITALAPSTMKIKIIAPPERKYSVWIGGSILASLSTFQQMWIS | |
| KQEYDEAGPSIVHRKCF | |

[0183] TABLE 62

| | |
|---|---|
| cbe_3694420 ARHGEF2 | |
| rho/rac guanine nucleotide exchange factor (GEF) 2 | |
| length = 958 | |
| MKEAKDARYTNGHLFTTISVSGMTMCYACNKSITAKEALICPTCNVTIHNRCKDTLANCT | SEQ ID NO: 53 |
| KVKQKQQKAALLKNNTALQSVSLRSKTTIRERPSSAIYPSDSFRQSLLGSRRGRSSLSLA | |
| KSVSTTNIAGHFNDESPLGLRRILSQSTDSLNNRNRTLSVESLIDEEVIYSELMSDFEMD | |
| EKDFAADSWSLAVDSSFLQQHKKEVMKQQDVIYELIQTELHHVRTLKIMTRLFRTGMLEE | |
| LHLEPGVVQGLFPCVDELSDIHTRFLSQLLERRRQALCPGSTRNFVIHRLGDLLISQFSG | |
| PSAEQMCKTYSEFCSRHSKALKLYKELYARDKRFQQFIRKVTRPAVLKRHGVQECILLVT | |
| QRITKYPLLISRILQHSHGIEEERQDLTTALGLVKELLSNVDEGIYQLEKGARLQEIYNR | |
| MDPRAQTPVPGKGPFGREELLRRKLIHDGCLLWKTATGRFKDVLVLLMTDVLVFLQEKDQ | |
| KYIFPTLDKPSVVSLQNLIVRDIANQEKGMFLISAAPPEMYEVHTASRDDRSTWIRVIQQ | |
| SVRTCPSREDFPLIETEDEAYLRRIKMELQQKDRALVELLREKVGLFAEMTHFQAEEDGG | |
| SGMALPTLPRGLFRSESLESPRGERLLQDAIREVEGLKDLLVGPGVELLLTPREPALPLE | |
| PDSGGNTSPGVTANGEARTFNGSIELCRADSDSSQRDRNGNQLRSPQEEALQRLVNLYGL | |
| LHGLQAAVAQQDTLMEARFPEGPERREKLCRANSRDGEAGRAGAAPVAPEKQATELALLQ | |
| RQHALLQEELRRCRRLGEERATEAGSLEARLRESEQARALLEREAEEARRQLAALGQTEP | |
| LPAEAPWARRPVDPRRRSLPAGDALYLSFNPPQPSRGTDRLDLPVTTRSVHRNFEDRERQ | |
| ELGSPEERLQDSSDPDTGSEEEGSSRLSPPHSPRDFTRMQDIPEETESRDGEAVASES | |

[0184] TABLE 63

| | |
|---|---|
| cbe_3705944 TNFAIP1 | |
| tumor necrosis factor, alpha-induced protein 1 (endothelial) | |
| length = 316 | |
| MSGDTCLCPASGAKPKLSGFKGGGLGNKYVQLNVGGSLYYTTVRALTRHDTMLKAMFSGR | SEQ ID NO: 54 |
| MEVLTDKEGWILIDRCGKHFGTILNYLRDDTITLPQNRQEIKELMAEAKYYLIQGLVNMC | |
| QSALQDKKDSYQPVCNIPIITSLKEEERLIESSTKPVVKLLYNRSNNKYSYTSNSDDHLL | |
| KNIELFDKLSLRFNGRVLFIKDVIGDEICCWSFYGQGRKLAEVCCTSIVYATEKKQTKVE | |
| FPEARIYEETLNVLLYETPRVPDNSLLEATSRSRSQASPSEDEETFELRDRVRRIHVKRY | |
| STYDDRQLGHQSTHRD | |

[0185] TABLE 64

| | |
|---|---|
| cbe_3753270 gbh_ac004503 | |
| Homo sapiens chromosome 5, P1 clone 1354A7 (LBNL H47), complete | |
| length = 515 | |
| MALFVRLLALALALALGPAATLAGPAKSPYQLVLQHSRLRGRQHGPNVCAVQKVIGTNRK | SEQ ID NO: 55 |
| YFTNCKQWYQRKICGKSTVISYECCPGYEKVPGEKGCPAALPLSNLYETLGVVGSTTTQL | |
| YTDRTEKLRPEMEGPGSFTIFAPSNEAWASLPAEVLDSLVSNVNIELLNALRYHMVGRRV | |
| LTDELKHGMTLTSMYQNSNIQIHHYPNGIVTVNCARLLKADHHATNGVVHLIDKVISTIT | |
| NNIQQIIEIEDTFETLRAAVAASGLNTMLEGNGQYTLLAPTNEAFEKIPSETLNRILGDP | |
| EALRDLLNNHILKSAMCAEAIVAGLSVETLEGTTLEVCCSGDMLTINGKAIISNKDILAT | |
| NGVIHYIDELLIPDSAKTLFELAAESDVSTAIDLFRQAGLGNHLSGSERLTLLAPLNSVF | |
| KDGTPPIDAHTRNLLRNHIIKDQLASKYLYHGQTLETLGGKKLRVFVYRNSLCIENSCIA | |
| AHDKRGRYGTLFTMDRVLTPPMGTVMDVLKGDNRF | |

[0186] TABLE 65

| | |
|---|---|
| cbe_3764052 MARK4 | |
| MAP/microtubule affinity-regulating kinase 4 | |
| length = 381 | |
| MPFGNTHNKFKLNYKPEEEYPDLSKHNNHMAKVLTLELYKKLRDKETPSGFTVDDVIQTG | SEQ ID NO: 56 |
| VDNPGHPFIMTVGCVAGDEESYEVFKELFDPIISDRHGGYKPTDKHKTDLNHENLKGGDD | |
| LDPNYVLSSRVRTGRSIKGYTLPPHCSRGERRAVEKLSVEALNSLTGEFKGKYYPLKSMT | |
| EKEQQQLIDDHFLFDKPVSPLLLASGMARDWPDARGIWHNDNKSFLVWVNEEDHLRVISM | |
| EKGGNMKEVFRRFCVGLQKIEEIFKKAGHPFMWNQHLGYVLTCPSNLGTGLRGGVHVKLA | |
| HLSKHPKFEEILTRLRLQKRGTGGVDTAAVGSVFDVSNADRLGSSEVEQVQLVVDGVKLM | |
| VEMEKKLEKGQSIDDMIPAQK | |

[0187] TABLE 66

| | |
|---|---|
| cbe_3770440 gbh_af217505 | |
| Homo sapiens uncharacterized bone marrow protein BM028 mRNA, | |
| length = 116 | |
| MWTKKDAGKKVVPCRHDWHQTGGEVTISVYAKNSLPELSRVEANSTLLNVHIVFEGEKEF | SEQ ID NO: 57 |
| DQNVKLWGVIDVKRSYVTMTATKIEITMRKAEPMQWASLELPAAKKQEKQKDDTTD | |

[0188] TABLE 67

| | |
|---|---|
| cbe_3772244 PIGQ | |
| phosphatidylinositol glycan, class Q | |
| length = 760 | |
| MVLKAFFPTCCVSTDSGLLVGRWVPEQSSAVVLAVLHFPFIPIQVKQLLAQVRQASQVGV | SEQ ID NO: 58 |
| AVLGTWCHCRQEPEESLGRFLESLGAVFPHEPWLRLCRERGGTFWSCEATHRQAPTAPGA | |
| PGEDQVMLIFYDQRQVLLSQLHLPTVLPDRQAGATTASTGGLAAVFDTVARSEVLFRSDR | |
| FDEGPVRLSHWQSEGVEASILAELARRASGPICLLLASLLSLVSAVSACRVFKLWPLSFL | |
| GSKLSTCEQLRHRLEHLTLIFSTRKAENPAQLMRKANTVASVLLDVALGLMLLSWLHGRS | |
| RIGHLADALVPVADHVAEELQHLLQWLMGAPAGLKMNRALDQVLGRFFLYHIHLWISYIH | |
| LMSPFVEHILWHVGLSACLGLTVALSLLSDIIALLTFHIYCFYVYGARLYCLKIHGLSSL | |
| WRLFRGKKWNVLRQRVDSCSYDLDQLFIGTLLFTILLFLLPTTALYYLVFTLLRLLVVAV | |
| QGLIHLLVDLINSLPLYSLGLRLCRPYRLADKPTALQPRGAHLPPPQLWLPPQALLGRPV | |
| PQAVPWGAHLPLEAERGQAGLRELLARLAPPHGHSQPSALPGWHQLSWRMSCALWTLLCA | |
| PEHGRPCYHTLGLEVIGSEQMWGWPARLAALHHWHCLPWDPLPTCCGHHGGEHSNPRCPE | |
| HCPMPTLCTQVQRVRPPQQPQVECWSPWGLPSGSALAVGVEGPCQDEPPSPRHPLAPSAE | |
| QHPASGGLKQSLTPVPSGPGPSLPEPHGVYLRNFPGEVAL | |

[0189] TABLE 68

| | |
|---|---|
| cbe_3773649 EEF1A1L14 | |
| eukaryotic translation elongation factor 1 alpha 1-like 14 | |
| length = 398 | |
| MQSERGITIDISLWKFETSKYYVTIIDAPGHRDFIQNMITGTSQADCAVLIVAAGVGEFE | SEQ ID NO: 59 |
| AGISKNGQTREHALLAYTLGVKQLIVGVNKMDSTEPPYSQKRYEEIVKEVSTYIKKIGYN | |
| PDTVAFVPISGWNGDNMLEPSANMPWFKGWKVTRKDGNASGTTLLEALDCILPPTRPTDK | |
| PLGLPLQDVYKICGIGTVPVGRVETGVLKPGMVVTFGPVNVTTEVKSVEMHHEALGEALP | |
| GDNVGFNVKNVSVKDVRRCNVAGDSKNDPPMEAAGFPAQVIILNHPGQISAGYAPVLDCH | |
| TAHIACKFAELKEKIDRRSGKKLEDGPKFLKSGDAAIVDMVPGKPMCVESFSDYPPLGCF | |
| AVRDMRQTVAVGVIKAVDKKAACAGKVTKSAQKAQKAK | |

[0190] TABLE 69

| | |
|---|---|
| cbe_3787129 LOC55828 | |
| zinc finger protein ZNF140-like protein | |
| length = 478 | |
| MSQVTFSDVAIDFSHEEWACLDSAQRDLYKDVMVQNYENLVSVGLSVTKPYVIMLLEDGK | SEQ ID NO: 60 |
| EPWMMEKKLSKAYPFPLSHSVPASVNFGFSALFEHCSEVTEIFELSELCVFWVLHFLSNS | |
| PNSTVEAFSRSKKKKKKKKKRQCFAFLIYFRLGIKMGKQGIINKEGYLYEDSPQPVTMEK | |
| VVKQSYEFSNSNKNLEYTECDTFRSTFHSKSTLSEPQNNSAEGNSHKYDILKKNLSKKSV | |
| IKSERINGGKKLLNSNKSGAAFNQSKSLTLPQTCNREKIYTCSECGKAFGKQSILSRHWR | |
| IHTGEKPYECRECGKTFSHGSSLTRHQISHSGEKPYKCIECGKAFSHGSSLTNHQSTHTG | |
| EKPYECMNCGKSFSRVSLLIQHLRIHTQEKRYECRICGKAFIHSSSLIHHQKSHTGEKPY | |
| ECRECGKAFCCSSHLTQHQRIHSMKYKYECNKCLKVFSSFSFLVQHQSIHTEEKPFEV | |

[0191] TABLE 70

| | |
|---|---|
| cbe_3789063 AP2M1 | |
| adaptor-related protein complex 2, mu 1 subunit | |
| length = 435 | |
| MIGGLFIYNHKGEVLISRVYRDDIGRNAVDAFRVNVIHARQQVRSPVTNIARTSFFHVKR | SEQ ID NO: 61 |
| SNIWLAAVTKQNVNAAMVFEFLYKMCDVMAAYFGKISEENIKNNFVLIYELLDEILDFGY | |
| PQNSETGALKTFITQQGIKSQHQTKEEQSQITSQVTGQIGWRREGIKYRRNELFLDVLES | |
| VNLLMSPQGQVLSAHVSGRVVMKSYLSGMPECKFGMNDKIVIEKQGKGTADETSKSGKQS | |
| IAIDDCTFHQCVRLSKFDSERSISFIPPDGEFELMRYRTTDDIILPFRVIPLVREVGRTK | |
| LEVKVVIKSNFKPSLLAQKIEVRIPTPLNTSGVQVICMKCKAKYKASENAIVWKIKRMAG | |
| MKESQISAEIELLPTNDKKKWARPPISMNFEVPFAPSGLKVRYLKVFEPKLNYSDHDVIK | |
| WVRYIGRSGIYETRC | |

[0192] TABLE 71

| | |
|---|---|
| cbe_3800240 IVD | |
| isovaleryl Coenzyme A dehydrogenase | |
| length = 423 | |
| MATATRLLGWRVASWRLRPPLAGFVSQRAYSLLPVDDAINGLSEEQRQLRQTMAKFLQEH | SEQ ID NO: 62 |
| LAPKAQEIDRSNEFKNLREFWKQLGNLGVLGITAPVQYCGSGLGYLEHVLVMEEISRASG | |
| AVGLSYGAHSNLCINQLVRNGNEAQKEKYLPKLISGEYIGALAMSEPNAGSDVVSMKLKA | |
| EKKGNHYILNGNKFWITNGPDADVLIVYAKTDLAAVPASRGITAFIVEKGMPGFSTSKKL | |
| DKLGMRGSNTCELIFEDCKIPAANILGHENKGVYVLMSGLDLERLVLAGGPLGLMQAVLD | |
| HTIPYLHVREAFGQKIGHFQLMQGKMADMYTRLMACRQYVYNVAKACDEGHCTAKDCAGV | |
| ILYSAECATQVALDGIQCFGGNGYINDFPMGRFLRDAKLYEIGAGTSEVRRLVIGRAFNA | |
| DFH | |

[0193] TABLE 72

| | |
|---|---|
| be_3810032 gbh_af142421 | |
| Homo sapiens QUAKING isoform 5 (QUAKING) mRNA, complete cds. | |
| length = 337 | |
| METKEKPKPTPDYLMQLMNDKKLMSSLPNFCGIFNHLERLLDEEISRVRKDMYNDTLNGS | SEQ ID NO: 63 |
| TEKRSAELPDAVGPIVQLQEKLYVPVKEYPDFNFVGRILGPRGLTAKQLEAETGCKIMVR | |
| GKGSMRDKKKEEQNRGKPNWEHLNEDLHVLITVEDAQNRAEIKLKRAVEEVKKLLVPAAE | |
| GEDSLKKMQLMELAILNGTYRDANIKSPALAFSLAATAQAAPRIITGPAPVLPPAALRTP | |
| TPAGPTIMPLIRQIQTAVMPNGTPHPTAAIVPPGPEAGLIYTPYEYPYTLAPATSILEYP | |
| IEPSGVLGAVATKVRRHDMRVHPYQRIVTADRAATGN | |

[0194] TABLE 73

| | |
|---|---|
| cbe_3810791 EPHB1 | |
| EphB1 | |
| length = 984 | |
| MALDYLLLLLLASAVAANEETLMDTRTATAELGWTANPASGWEEVSGYDENLNTIRTYQV | SEQ ID NO: 64 |
| CNVFEPNQNNWLLTTFINRRGAHRIYTEMRFTVRDCSSLPNVPGSCKETFNLYYYETDSV | |
| IATKKSAFWSEAPYLKVDTIAADESFSQVDFGGRLMKVNTEVRSFGPLTRNGFYLAFQDY | |
| GACMSLLSVRVFFKKCPSIVQNFAVFPETMTGAESTSLVIARGTCIPNAEEVDVPIKLYC | |
| NGDGEWMVPIGRCTCKPGYEPENSVACKACPAGTFKASQEAEGCSHCPSNSRSPAEASPI | |
| CTCRTGYYRADFDPPEVACTSVPSGPRNVISIVNETSIILEWHPPRETGGRDDVTYNIIC | |
| KKCRADRRSCSRCDDNVEFVPRQLGLTECRVSISSLWAHTPYTFDIQAINGVSSKSPFPP | |
| QHVSVNITTNQAAPSTVPIMHQVSATMRSITLSWPQPEQPNGIILDYEIRYYEKEHNEFN | |
| SSMARSQTNTARIDGLRPGMVYVVQVRARTVAGYGKFSGKMCFQTLTDDDYKSELREQLP | |
| LIAGSAAAGVVFVVSLVAISIVCSRKRAYSKEAVYSDKLQHYSTGRGSPGMKIYIDPFTY | |
| EDPNEAVREFAKEIDVSFVKIEEVIGAGEFGEVYKGRLKLPGKREIYVAIKTLKAGYSEK | |
| QRRDFLSEASIMGQFDHPNIIRLEGVVTKSRPVMIITEFMENGALDSFLRQNDGQFTVIQ | |
| LVGMLRGIAAGMKYLAEMNYVHRDLAARNILVNSNLVCKVSDFGLSRYLQDDTSDPTYTS | |
| SLGGKIPVRWTAPEAIAYRKFTSASDVWSYGIVMWEVMSFGERPYWDMSNQDVINAIEQD | |
| YRLPPPMDCPAALHQLMLDCWQKDRNSRPRFAEIVNTLDKMIRNPASLKTVATITAVPSQ | |
| PLLDRSIPDFTAFTTVDDWLSAIKMVQYRDSFLTAGFTSLQLVTQMTSEDLLRIGITLAG | |
| HQKKILNSIHSMRVQISQSPTAMA | |

[0195] TABLE 74

| | |
|---|---|
| cbe_3820530 PGAM1 | |
| phosphoglycerate mutase 1 (brain) | |
| length = 254 | |
| MAAYKLVLIRHGESAWNLENRFSGWYDADLSPAGHEEAKRGCQALRDAGYEFDICFTSVQ | SEQ ID NO: 65 |
| KRAIRTLWTVLDAIDQMWLPVVRTWRLNERHYGCLTGLNKAETAAKHGEAQVKIWRRSYD | |
| VPPPPMEPDHPFYSNISKDRRYADLTEDQLPSCESLKDTIARALPFWNEEIVPQIKEGKR | |
| VLIAAHGNSLRGIVKHLEGLSEEAIMELNLPTGIPIVYELDKNLKPIKPMQFLGDEETVR | |
| KANEAVAAQCKAKK | |

[0196] TABLE 75

| | |
|---|---|
| cbe_3825897 POLR2L | |
| polymerase (RNA) II (DNA directed) polypeptide L, 7.6 kDa | |
| length = 67 | |
| MIIPVRCFTCGKIVGNKWEAYLGLLQAEYTEGDALDALGLKRYCCRRMLLAHVDLIEKLL | SEQ ID NO: 66 |
| NYAPLEK | |

[0197] TABLE 76

| | |
|---|---|
| cbe_3826540 NYD-TSP1 | |
| testis-specific protein NYD-TSP1 | |
| length = 430 | |
| MASSAKSAEMPTISKTLNPTPDPHQEYLDPRITIALFEIGSHSPSSWGSLPFLKNSSHQV | SEQ ID NO: 67 |
| TEQQTAQKFNNLLKEIKDILKNMAGFEEKITEAKELFEETNITEDVSAHKENIRGLDKIN | |
| EMLSTNLPVSLAPEKEDNEKKQEMILETNITEDVSAHKENIRGLDKINEMLSTNLPVSLA | |
| PEKEDNEKKQQMIMENQNSENTAQVFARDLVNRLEEKKVLNETQQSQEKAKNRLNVQEET | |
| MKIRNNMEQLLQEAEHWSKQHTELSKLIKSYQKSQKDISETLGNNGVGFQTQPNNEVSAK | |
| HELEEQVKKLSHDTYSLQLMAALLENECQILQQRVEILKELHHQKQGTLQEKPIQINYKQ | |
| DKKNQKPSEAKKVEMYKQNKQAMKGTFWKKDRSCRSLDVCLNKKACNTQFNIHVARKALR | |
| GKMRSASSLR | |

[0198] TABLE 77

| | |
|---|---|
| cbe_3833533 TRIM29 | |
| tripartite motif-containing 29 | |
| length = 588 | |
| MEAADASRSNGSSPEARDARSPSGPSGSLENGTKADGKDAKTTNGHGGEAAEGKSLGSAL | SEQ ID NO: 68 |
| KPGEGRSALFAGNEWRRPIIQFVESGDDKNSNYFSMDSMEGKRSPYAGLQLGAAKKPPVT | |
| FAEKGELRKSIFSESRKPTVSIMEPGETRRNSYPRADTGLFSRSKSGSEEVLCDSCIGNK | |
| QKAVKSCLVCQASFCELHLKPHLEGAAFRDHQLLEPIRDFEARKCPVHGKTMELFCQTDQ | |
| TCICYLCMFQEHKNHSTVTVEEAKAEKETELSLQKEQLQLKIIEIEDEAEKWQKEKDRIK | |
| SFTTNEKAILEQNFRDLVRDLEKQKEEVRAALEQREQDAVDQVKVIMDALDERAKVLHED | |
| KQTREQLHSISDSVLFLQEFGALMSNYSLPPPLPTYHVLLEGEGLGQSLGNFKDDLLNVC | |
| MRHVEKMCKADLSRNFIERNEMENGGDHRYVNNYTNSFGGEWSAPDTMKRYSMYLTPKGG | |
| VRTSYQPSSPGRFTKETTQKNFNNLYGTKGNYTSRVWEYSSSIQNSDNDLPVVQGSSSFS | |
| LKGYPSLMRSQSPKAQPQTWKSGKQTMLSHYRPFYVNKGNGIGSNEAP | |

[0199] TABLE 78

| | |
|---|---|
| cbe_3834015 TFPI | |
| tissue factor pathway inhibitor (lipoprotein-associated coagulation inhibitor) | |
| length = 304 | |
| MIYTMKKVHALWASVCLLLNLAPAPLNADSEEDEEHTIITDTELPPLKLMHSFCAFKADD | SEQ ID NO: 69 |
| GPCKAIMKRFFFNIFTRQCEEFIYGGCEGNQNRFESLEECKKMCTRDNANRIIKTTLQQE | |
| KPDFCFLEEDPGICROYITRYFYNNQTKQCERFKYGGCLGNMNNFETLEECKNICEDGPN | |
| GFQVDNYGTQLNAVNNSLTPQSTKVPSLFEFHGPSWCLTPADRGLCRANENRFYYNSVIG | |
| KCRPFKYSGCGGNENNFTSKQECLRACKKGFIQRISKCGLIKTKRKRKKQRVKIAYEEIF | |
| VKNM | |

[0200] TABLE 79

| | |
|---|---|
| cbe_3842044 PSMB3 | |
| proteosome (prosome, macropain) subunit, beta type, 3 | |
| length = 205 | |
| MSIMSYNGGAVMAMKGKNCVAIAADRRFGIQAQLVTTDFQKIFPMGDRLYIGLACLATDV | SEQ ID NO: 70 |
| QTVAQRLKFRLNLYELKEGRQIKPYTLMSMVANLLYEKRFGPYYTEPVIAGLDPKTFKPF | |
| ICSLDLIGCPMVTDDFVVSGTCAEQMYGMCESLWEPNMDPDHLFETISQAMLNAVDRDAV | |
| SGMGVIVHIIEKDKITTRTLKARMD | |

[0201] TABLE 80

| | |
|---|---|
| cbe_3845697 Hs. 191063 | |
| Human DNA sequence from clone RP1-63M2 on chromosome 20 Contains the gene for | |
| CBFA2T2 (core-binding factor, runt domain, alpha subunit 2; translocated to, | |
| 2), part of a gene for a protein similar to ACTIN, the E2F1 (E2F transcription | |
| factor 1) gene, a nov | |
| length = 412 | |
| DRGREVSGRRSRVARRSGAFSPAAGPSPKVASVSGSRRVHRPSSLGRIAVVVDQGSGFTK | SEQ ID NO: 71 |
| AGFAGENQPRIVLKSSSLVPSWDRPVLPGAPGCELAGGVAPAHPIKHGVVADWEALEGLW | |
| ERLLVGGLRVCPEQWPVLVSDSPLAPPAGRERVAELLFETLAVPACHMASTALLALCSTG | |
| AFSGLAVEAGAGVCHATPIYAGHSWHQATFRLNVAGSTLSRYLRDLLVAANPDLLQQALP | |
| RKAITHLKKRSCYVSLDFEGDLRDPARHHPASFSVGNGCCVCLSSERFRCPEPIFQPGLL | |
| GQAEQGLPALAFRALQKMPKTLRTRLADTVVLAGGSTLFPGFAERLDKELEAQCRRHGYA | |
| ALRPHLVAKHGRGMAVWTGGSMVASLHSFQRRWITRAMYQECGSRLLYDVFN | |

[0202] TABLE 81

| | |
|---|---|
| cbe_3849002 CKLF1 | |
| chemokine-like factor 1 | |
| length = 152 | |
| MDNVQPKIKHRPFCFSVKGHVKMLRLALTVTSMTFFIIAQAPEPYIVITGFEVTVILFFI | SEQ ID NO: 72 |
| LLYVLRLDRLMKWLFWPLLDIINSLVTTVFMLIVSVLALIPETTTLTVGGGVFALVTAVC | |
| CLADGALIYRKLLFNPSGPYQKKPVHEKKEVL | |

[0203] TABLE 82

| | |
|---|---|
| cbe_3880186 FLJ20343 | |
| hypothetical protein FLJ20343 | |
| length = 501 | |
| MAQPHTTSVPYFARSPAPPPPSRSGAPPQPPATLRPSRRRTRPPRPADRRDAPADCAYLW | SEQ ID NO: 73 |
| RILTPRRGRARRSDVGARHRACGRRDVLLSRQGPANPEGARRVVGGQERVWPAVRRGRCG | |
| SMFRLLSWSLGRGFLRAAGRRCRGCSARLLPGLAGGPGPEVQVPPSRVAPHGRGPGLLPL | |
| LAALAWFSRPAAAEEEEQQGADGAAAEDGADEAEAEIIQLLKRAKLSIMKDEPEEAELIL | |
| HDALRLAYQTDNKKAITYTYDLMANLAFIRGQLENAEQLFKATMSYLLGGGMKQEDNAII | |
| ElSLKLASIYAAQNRQEFAVAGYEFCISTLEEKIEREKELAEDIMSVEEKANTHLLLGMC | |
| LDACARYLLFSKQPSQAQRMYEKALQISEEIQGERHPQTIVLMSDLATTLDAQGRFDEAY | |
| IYMQRASDLARQINHPELHMVLSNLAAVLMHRERYTQAKEIYQEALKQAKLKKDEISVQH | |
| IREELAELSKKSRPLTNSVKL | |

[0204] TABLE 83

| | |
|---|---|
| cbe_3884811 RCP | |
| Rab coupling protein | |
| length = 649 | |
| MSLMVSAGRGLGAVWSPTHVQVTVLQARGLRAKGPGGTSDAYAVIQVGKEKYATSVSERS | SEQ ID NO: 74 |
| LGAPVWREEATFELPSLLSSGPAAAATLQLTVLHRALLGLDKFLGRAEVDLRDLHRDQCR | |
| RKTQWYKLKSKPGKKDKERGEIEVDIQFMRNNMTASMFDLSMKDKSRNPFGKLKDKIKGK | |
| NKDSGSDTASAIIPSTTPSVDSDDESVVKDKKKKSKIKTLLSKSNLQKTPLSQSMSVLPT | |
| SKPEKVLLRPGDFQSQWDEDDNEDESSSASDVMSHKRTASTDLKQLNQVNFTLPKKEGLS | |
| FLGGLRSKNDVLSRSNVCINGNHVYLEQPQPTGEIKDSSPSSSPSPKGFRKKTLFSSTEN | |
| LAAGSWKEPAEGGGLSTDRDVSESSTKDSLKSMTLPTYRPAPLISGDLREKMAPANSEAT | |
| KEAKESKKPESRRSSLLSLMTGKKDVAKGSECENLLTVPGREKEGMLMGVKPGEDASGPA | |
| EDLVRRSEKDTAAVVSRQGSSLNLFEDVQITEPEAEPESKSEPRPPISSPRAPQTRAVKP | |
| RLHPVKPMNATATKVANCSLGTATIISENLNNEVMMKKYSPSDPAFAYAQLTHDELIQLV | |
| LKQKETISKKEFQVRELEDYIDNLLVRVMEETPNILRIPTQVGKKAGKM | |

[0205] TABLE 84

| | |
|---|---|
| cbe_4138433 KIFAP3 | |
| kinesin-associated protein 3 | |
| length = 792 | |
| MQGEDARYLKRKVKGGNIDVHPSEKALIVHYEVEATILGEMGDPMLGERKECQKIIRLKS | SEQ ID NO: 75 |
| LNANTDITSLARKVVEECKLIHPSKLNEVEQLLYYLQNRRDSLSGKEKKEKSSKPKDPPP | |
| FEGMEIDEVANINDMDEYIELLYEDTPDKVRGSALILQLARNPDNLEELLLNETALGALA | |
| RVLREDWKQSVELATNIIYIFFCFSSFSQFHGLITHYKIGALCMNIIDHELKRHELWQEE | |
| LSKKKKAVDEDPENQTLRKDYEKTFKKYQGLVVKQEQLLRVALYLLLNLAEDTRTELKMR | |
| NKNIVHMLVKALDRDNFELLILVVSFLKKLSIFMENKNDMVEMDIVEKLVKMIPCEHEDL | |
| LNITLRLLLNLSFDTGLRNKMVQVGLLPKLTALLGNDNYKQIANCVLYHISMDDRFKSMF | |
| AYTDCIPQLMKMLFECSDERIDLELISFCINLAANKRNVQLICEGNGLKMLMKRALKFKD | |
| PLLMKMIRNISQHDGPTKNLFIDYVGDLAAQISNDEEEEFVIECLGTLANLTIPDLDWEL | |
| VLKEYKLVPYLKDKLKPGAAEDDLVLEVVIMIGTVSMDDSCAALLAKSGIIPALIELLNA | |
| QQEDDEFVCQIIYVFYQMVFHQATRDVIIKETQAPAYLIDLMHDKNNEIRKVCDNTLDII | |
| AEYDEEWAKKIQSEKFRWHNSQWLEMVESRQMDESEQYLYGDDRIEPYIHEGDILERPDL | |
| FYNSDGLIASEGAISPDFFNDYHLQNGDVVGQHSFPGSLGMDGFGQPVGILGRPATAYGF | |
| RPDEPYYYGYGS | |

[0206] TABLE 85

| | |
|---|---|
| cbe_4279962 DKKL1-pending | |
| soggy-1 gene | |
| length = 242 | |
| MGEASPPAPARRHLLVLLLLLSTLVIPSAAAPIHDADAQESSLGLTGLQSLLQGFSRLFL | SEQ ID NO: 76 |
| KGNLLRGIDSLFSAPMDFRGLPGNYHKEENQEHQLGNNTLSSHLQIDKMTDNKTGEVLIS | |
| ENVVASIQPAEGSFEGDLKVPRMEEKEALVPIQKATDSFHTELHPRVAFWIIKLPRRRSH | |
| QDALEGGHWLSEKRHRLQAIRDGLRKGTHKDVLEEGTESSSHSRLSPRKTHLLYILRPSR | |
| QL | |

[0207] TABLE 86

| | |
|---|---|
| cbe_4281271 CRYAB | |
| crystallin, alpha B | |
| length = 175 | |
| MDIAIHHPWIRRPFFPFHSPSRLFDQFFGEHLLESDLFPTSTSLSPFYLRPPSFLRAPSW | SEQ ID NO: 77 |
| FDTGLSEMRLEKDRFSVNLDVKHFSPEELKVKVLGDVIEVHGKHEERQDEHGFISREFHR | |
| KYRIPADVDPLTITSSLSSDGVLTVNGPRKQVSGPERTIPITREEKPAVTAAPKK | |

[0208] TABLE 87

| | |
|---|---|
| cbe_4344185 SRA1 | |
| steroid receptor RNA activator 1 | |
| length = 237 | |
| MTRCPAGQAEVEMAELYVKPCNKERGWNDPPQFSYGLQTQAGGPRRSLLTKRVAAPQDGS | SEQ ID NO: 78 |
| PRVPASETSPGPPPMGPPPPSSKAPRSPPVGSGPASGVEPTSFPVESEARLMEDVLRPLE | |
| QALEDCRGHTRKQVCDDISRRLALLQEQWAGCKLSIPVKKRMALLVQELSSHRWDAADDI | |
| HRSLMVDHVTEVSQWMVGVKRLIAEKRSLFSEEAANEEKSAATAEKNHTIPGFQQAS | |

[0209] TABLE 88

| | |
|---|---|
| cbe_4383836 KIAA0905 | |
| yeast Sec31p homolog | |
| length = 1220 | |
| MKLKEVDRTAMQAWSPAQNHPIYLATGTSAQQLDATFSTNASLEIFELDLSDPSLDMKSC | SEQ ID NO: 79 |
| ATFSSSHRYHKLIWGPYKMDSKGDVSGVLIAGGENGNIILYDPSKIIAGDKEVVIAQNDK | |
| HTGPVRALDVNIFQTNLVASGANESEIYIWDLNNFATPMTPGAKTQPPEDISCIAWNRQV | |
| QHILASASPSGRATVWDLRKNEPIIKVSDHSNRMHCSGLAWHPDVATQMVLASEDDRLPV | |
| IQMWDLRFASSPLRVLENHARGILAIAWSMADPELLLSCGKDAKILCSNPNTGEVLYELP | |
| TNTQWCFDIQWCPRNPAVLSAASFDGRISVYSINGGSTDGLRQKQVDKLSSSFGNLDPFG | |
| TGQPLPPLQIPQQTAQHSIVLPLKKPPKWIRRPVGASFSFGGKLVTFENVRMPSHQGAEQ | |
| QQQQHHVFISQVVTEKEFLSRSDQLQQAVQSQGFINYCQKKIDASQTEFEKNVWSFLKVN | |
| FEDDSRGKYLELLGYRKEDLGKKIALALNKVDGANVALKDSDQVAQSDGEESPAAEEQLL | |
| GEHIKEEKEESEFLPSSGGTFNISVSGDIDGLITQALLTGNFESAVDLCLHDNRMADAII | |
| LAIAGGQELLARTQKKYFAKSQSKITRLITAVVMKNWKEIVESCDLKNWREALAAVLTYA | |
| KPDEFSALCDLLGTRLENEGDSLLQTQACLCYICAGNVEKLVACWTKAQDGSHPLSLQDL | |
| IEKVVILRKAVQLTQAMDTSTVGVLLAAKMSQYANLLAAQGSIAAALAFLPDNTNQPNIM | |
| QLRDRLCRAQGEPVAGHESPKIPYEKQQLPKGRPGPVAGHHQMPRVQTQQYYPHGENPPP | |
| PGFIMHGNVNPNASGQLPTSPGHMHTQVPPYPQPQPYQPAQPYPFGTGGSAMYRPQQPVA | |
| PPTSNAYPNTPYISSASSYTGQSQLYAAQHQASSPTSSPATSFPPPPSSGASFQHGGPGA | |
| PPSSSAYALPPGTTGTLPAASELPASQRTGPQNGWNDPPALNRVPKKKKMPENFMPPVPI | |
| TSPIMNPLGDPQSQMLQQQPSAPVPLSSQSSFPQPHLPGGQPFHGVQQPLGQTGMPPSFS | |
| KPNIEGAPGAPIGNTFQHVQSLPTKKITKKPIPDEHLILKTTFEDLIQRCLSSATDPQTK | |
| RKLDDASKRLEFLYDKLREQTLSPTITSGLHNIARSIETRNYSEGLTMHTHIVSTSNFSE | |
| TSAFMPVLKVVLTQANKLGV | |

[0210] TABLE 89

| | |
|---|---|
| cbe_4540466 PUM1 | |
| pumilio homolog 1 (Drosophila) | |
| length = 1186 | |
| MSVACVLKRKAVLWQDSFSPHLKHHPQEPANPNNPVVLTSGTGSQAQPQPAANQALAAGT | SEQ ID NO: 80 |
| HSSPVPGSIGVAGRSQDDANVDYFFQRQHGEQLGGGGSGGGGYNNSKHRWPTGDNIHAEH | |
| QVRSMDELNHDFQALALEGPANGEQLLPGKKFWETDESSKDGPKGIFLGDQWRDSAWGTS | |
| DHSVSQPIMVQRRPGQSFHVNSEVNSVLSPRSESGGLGVSMVEYVLSSSPGDSCLRKGGF | |
| GPRDADSDENDKGEKKNKGTFDGDKLGDLKEEGDVMDKTNGLPVQNGIDADVKDFSRTPG | |
| NCQNSANEVDLLGPNQNGSEGLAQLTSTNGAKPVEDFSNMESQSVPLDPMEHVGMEPLQF | |
| DYSGTQVPVDSAAATVGLFDYNSQQQLFQRPNALAVQQLTAAQQQQYALAAAHQPHIGLA | |
| PAAFVPNPYIISAAPPGTDPYTAGLAAAATLGPAVVPHQYYGVTPWGVYPASLFQQQAAA | |
| AAAATNSANQQTTPQAQQGQQQVLRGGASQRPLTPNQNQQGQQTDPLVAAAAVNSALAFG | |
| QGLAAGMPGYPVLAPAAYYDQTGALVVNAGARNGLGAPVRLVAPAPVIISSSAAQAAVAA | |
| AAASANGAAGGLAGTTNGPFRPLGTQQPQPQPQQQPNNNLASSSFYGNNSLNSNSQSSSL | |
| FSQGSAQPANTSLGFGSSSSLGATLGSALGGFGTAVANSNTGSGSRRDSLTGSSDLYKRT | |
| SSSLTPIGHSFYNGLSFSSSPGPVGMPLPSQGPGHSQTPPPSLSSHGSSSSLNLGGLTNG | |
| SGRYISAAPGAEAKYRSASSASSLFSPSSTLFSSSRLRYGMSDVMPSGRSRLLEDFRNNR | |
| YPNLQLREIAGHIMEFSQDQHGSRFIQLKLERATPAERQLVFNEILQAAYQLMVDVFGNY | |
| VIQKFFEFGSLEQKLALAERIRGHVLSLALQMYGCRVIQKALEFIPSDQQNEMVRELDGH | |
| VLKCVKDQNGNHVVQKCIECVQPQSLQFIIDAFKGQVFALSTHPYGCRVIQRILEHCLPD | |
| QTLPILEELHQHTEQLVQDQYGNYVIQHVLEHGRPEDKSKIVAEIRGNVLVLSQHKFASN | |
| VVEKCVTHASRTERAVLIDEVCTMNDGPHSALYTMMKDQYANYVVQKMIDVAEPGQRKIV | |
| MHKIRPHIATLRKYTYGKHILAKLEKYYMKNGVDLGPICGPPNGII | |

[0211] TABLE 90

| | |
|---|---|
| cbe_4567083 LOC157378 | |
| hypothetical protein BC017881 | |
| length = 178 | |
| MEALNTAQGARDFIYSLHSTERSCLLKELHRFESIAIAQEKLEAPPPTPGQLRYVFIHNA | SEQ ID NO: 81 |
| IPFIGFGFLDNAIMIVAGTHIEMSIGIILGISTMAAAALGNLVSDLAGLGLAGYVEALAS | |
| RLGLSIPDLTPKQVDMWQTRLSTHLGKAVGVTIGCILGMFPLIFFGGGEEDEKLETKS | |

[0212] TABLE 91

| | |
|---|---|
| cbe_552975 HPV 1a E1 | |
| Human Papillomavirus 1a E1 | |
| length = 612 | |
| MADNKGTENDWFLVEATDCEETLEETSLGDLDNVSCVSDLSDLLDEAPQSQGNSLELFHK | SEQ ID NO: 82 |
| QESLESEQELNALKRKLLYSPQARSADETDIASISPRLETISITKQDKKRYRRQLFSQDD | |
| SGLELSLLQDETENIDESTQVDQQQKEHTGEVGAAGVNILKASNIRAALLSRFKDTAGVS | |
| FTDLTRSYKSNKTCCGDWVLAVWGVRENLIDSVKELLQTHCVYIQLEHAVTEKNRFLFLL | |
| VRFKAQKSRETVIKLITTILPVDASYILSEPPKSRSVAAALFWYKRSMSSTVFTWGTTLE | |
| WIAQQTLINHQLDSESPFELCKMVQWAYDNGHTEECKIAYYYAVLADEDENARAFLSSNS | |
| QAKYVKDCAQMVRHYLRAEMAQMSMSEWIFRKLDNVEGSGNWKEIVRFLRFQEVEFISFM | |
| IAFKDLLCGKPKKNCLLIFGPPNTGKSMFCTSLLKLLGGKVISYCNSKSQFWLQPLADAK | |
| IGLLDDATKPCWDYMDIYMRNALDGNTICIDLKHRAPQQIKCPPLLITSNIDVKSDTCWM | |
| YLHSRISAFKFAHEFPFKDNGDPGFSLTDENWKSFFERFWQQLELSDQEDEGNDGKPQQS | |
| LRLTARAANEPI | |

[0213] TABLE 92

| | |
|---|---|
| cbe_552976 HPV 11 L2 | |
| Human papillomavirus 11 L2 | |
| length = 455 | |
| MKPRARRRKRASATQLYQTCKATGTCPPDVIPKVEHTTIADQILKWGSLGVFFGGLGIGT | SEQ ID NO: 83 |
| GAGSGGRAGYIPLGSSPKPAITGGPAARPPVLVEPVAPSDPSIVSLIEESAIINAGAPEV | |
| VPPTQGGFTITSSESTTPAILDVSVTNHTTTSVFQNPLFTEPSVIQPQPPVEASGHILIS | |
| APTITSQHVEDIPLDTFVVSSSDSGPTSSTPLPRAFPRPRVGLYSRALQQVQVTDPAFLS | |
| TPQRLVTYDNPVYEGEDVSLQFTHESIHNAPDEAFMDIIRLHRPAITSRRGLVRFSRIGQ | |
| RGSMYTRSGQHIGARIHYFQDISPVTQAAEEIELHPLVAAENDTFDIYAEPFDPIPDPVQ | |
| HSVTQSYLTSTPNTLSQSWGNTTVPLSIPSDWFVQSGPDITFPTASMGTPFSPVTPALPT | |
| GPVFITGSDFYLHPTWYFARRRRKRIPLFFTDVAA | |

[0214] TABLE 93

| | |
|---|---|
| cbe_71919 FLJ13236 | |
| hypothetical protein FLJ13236 | |
| length = 341 | |
| MAKGLLVTYALWAVGGPACLHHLYLGRDSHALLWMLTLGGGGLGWLWEFWKLPSFVAQAN | SEQ ID NO: 84 |
| RAQGQRQSPRGVTPPLSPIRFAAQVIVGIYFGLVALISLSSMVNFYIVALPLAVGLGVLL | |
| VAAVGNQTSDFKNTLGSAFLTSPIFYGRPIAILPISVAASITAQRHRRYKALVASEPLSV | |
| RLYRLGLAYLAFTGPLAYSALCNTAATLSYVAETFGSFLNWFSFFPLLGRLMEFVLLLPY | |
| RIWRLLMGETGFNSSCFQEWAKLYEFVHSFQDEKRQLAYQVLGLSEGATNEEIHRSYQEL | |
| VKVWHPDHNLDQTEEAQRHFLEIQAAYEVLSQPRKPWGSRR | |

[0215] TABLE 94

| | |
|---|---|
| cbe_1380530 RPL13 | |
| ribosomal protein L13 | |
| length = 1110 | |
| ctttccgctcggctgttttcctgcgcaggagccgcagggccgtaggcagccatggcgccc | SEQ ID NO: 85 |
| agccggaatggcatggtcttgaagccccacttccacaaggactggcagcggcgcgtggcc | |
| acgtggttcaaccagccggcccgtaagatccgcagacgtaaggcccggcaagccaaggcg | |
| cgccgcatcgccccgcgccccgcgtcgggtcccatccggcccatcgtgcgctgccccacg | |
| gttcggtaccacacgaaggtgcgcgccggccgcggcttcagcctggaggagctcagggtg | |
| gccggcattcacaagaaggtggcccggaccatcggcatttctgtggatccgaggaggcgg | |
| aacaagtccacggagtccctgcaggccaacgtgcagcggctgaaggagtaccgctccaaa | |
| ctcatcctcttccccaggaagccctcggcccccaagaagggagacagttctgctgaagaa | |
| ctgaaactggccacccagctgaccggaccggtcatgcccgtccggaacgtctataagaag | |
| gagaaagctcgagtcatcactgaggaagagaagaatttcaaagccttcgctagtctccgt | |
| atggcccgtgccaacgcccggctcttcggcatacgggcaaaaagagccaaggaagccgca | |
| gaacaggatgttgaaaagaaaaaataaagccctcctggggacttggaatcagtcggcagt | |
| catgctgggtctccacgtggtgtgtttcgtgggaacaactgggcctgggatggggcttca | |
| ctgctgtgacttcctcctgccaggggatttggggctttcttgaaagacagtccaagccct | |
| ggataatgctttactttctgtgttgaagcactgttggttgtttggttagtgactgatgta | |
| aaacggttttcttgtggggaggttacagaggctgacttcagagtggacttgtgttttttc | |
| tttttaaagaggcaaggttgggctggtgctcacagctgtaatcccagcactttgaggttg | |
| gctgggagttcaagaccagcctggccaacatgtcagaactactaaaaataaagaaatcag | |
| ccatgaaaaaaaaaaaaaaaaaaaaaaaaa | |

[0216] TABLE 95

| | |
|---|---|
| cbe_1469980 FLJ20259 | |
| hypothetical protein FLJ20259 | |
| length = 3101 | |
| gagggttgaatgtaagatggcgcccagggagctgtgaggagaaaaccctgtcggtcttgg | SEQ ID NO: 86 |
| agcgacgacggcagaaccagggtccctggcggtgcggcggggccggcgggtgcagcggag | |
| gcggcggcggcggcggcagtgacgtcgccggaatattagaagtcttaagaactcaggaca | |
| agcagcagaaatacatgcaacatggtgactggaaccctaaggactctgcaatatgaataa | |
| ttccctagagaacaccatctcctttgaagagtacatccgagtaaaggcacggtctgtccc | |
| gcaacacaggatgaaggaatttctggactcactggcctctaaggggccagaagcccttca | |
| ggagttccagcagacagccaccactaccatggtgtaccaacagggtgggaactgcatata | |
| cacagacagcactgaagtggctgggtctttgcttgaacttgcctgtccagtcaccaccag | |
| tgttcagccacaaacccagcaagaacagcagatccaggttcagcagccgcagcaggttca | |
| ggtccaggtgcaggtacagcagtctccgcaacaggtctcggctcagctctccccacaact | |
| caccgttcaccagcctactgagcaacccatccaggtccaggtgcagatccaaggccaggc | |
| accacagtcagcagccccctccattcagaccccgtctctgcagagtcccagtccctcgca | |
| gctgcaagcagctcagatccaggtgcagcacgtgcaagcagcccagcagatccaggctgc | |
| agaaatcccggaggagcacatcccacatcagcaaatccaggctcagctggtggctggcca | |
| gtctcttgctggtggtcagcagatccaaatccagaccgtgggtgccctttccccaccacc | |
| atcccagcagggctcaccccgggaaggggagcggcgggttggcacggccagtgtcctcca | |
| accagtgaagaagcgcaaagtggagatgcccatcactgtgtcctacgccatctcagggca | |
| gccggtggccaccgtgctggccattccacagggccagcagcagagttatgtgtctttgag | |
| gccagacttactgacagtagacagtgcccacctgtacagtgccactgggaccattactag | |
| ccctacaggagaaacctggaccatccctgtttattctgcccagccccggggggaccctca | |
| gcagcagagcattacccacattgccattccccaggaagcctacaacgcagttcacgtcag | |
| tggctcacccacagccctggcagctgttaagctggaggatgacaaggagaagatggtggg | |
| caccacatctgtagtgaaaaactcccatgaagaggtagtgcagacccttgcaaactctct | |
| ctttccagcacagttcatgaatggcaacatccacattccagtggctgtgcaggctgtggc | |
| aggcacgtaccagaatacggctcaaactgtccatatatgggacccccaacagcagccgca | |
| gcagcaaactccccaggaacagacaccaccaccacagcagcagcagcagcaactccaagt | |
| tacttgttcagctcaaactgtccaggttgctgaagttgaaccacagtcacagccacagcc | |
| ttccccagaacttctgcttccaaattctttgaagccagaagaagggcttgaagtatggaa | |
| aaactgggcccagaccaagaatgctgaactagagaaggatgctcagaacagattggcacc | |
| cattgggaggcgccaactgctgcgattccaggaagatctcatctcctctgctgtggcaga | |
| gttgaattatgggctctgtctaatgacacgggaagctcgaaatggagaaggtgaacccta | |
| tgacccagatgtgctctactatattttcctgtgtattcaaaagtatctttttgaaaatgg | |
| aagggtagatgacattttctccgatctttattatgttcggttcacggagtggctacatga | |
| agttctgaaggatgttcagccccgggtcactccacttggctatgtcttgcccagccacgt | |
| gactgaggagatgctatgggagtgcaagcagcttggggctcactccccctccaccttgct | |
| gaccaccctcatgttctttaataccaagtacttcctattgaagacagtggaccagcacat | |
| gaagctggccttctccaaggtcttgcgacagacaaagaagaacccctctaatcccaagga | |
| taaaagcacgagtatccggtacttgaaggcccttggaatacaccagactggccagaaagt | |
| tacagatgacatgtatgcagaacagacggaaaatccagagaatccattgagatgtcccat | |
| caagctctatgatttctacctcttcaaatgcccccagagtgtgaaaggccggaatgacac | |
| cttttacctgacacctgagccagtggtggcccccaacagcccaatctggtactcagtcca | |
| gcctatcagcagagagcagatgggacaaatgctgacgcggatcctggtgataagagaaat | |
| tcaggaggccatcgcagtggccaatgcaagcactatgcactgagatgccttggccatggc | |
| acaagagaaaccagccaggaaaaaccagacagactttcacactaaagaagaggcctccat | |
| ttttttttttcttttttttattggtgtagttacgaagcctttcaggctgcttctgtttaa | |
| aatataaaagaaaactttgccccctttgcatcttcataaacctgctgcggcagactcctc | |
| agccgatggtggctctgggtttccttgagtgtcatatgtcccagaaagttgctggctgac | |
| tcttttttgtctggggcctggggaaagggcttggactgtgaaaagaaatgtggccccttt | |
| ccatcttcaagagagatggaattaatgatggatggaccctggagggaatctccccagccg | |
| acttccactgggctgacagactttgctgaccacaggggaacgatgttcttttctttcttc | |
| atgatcagacataaacttagcatcttaatggaagaaaaatgaggggaacttcaattatga | |
| tttattaaagacaatttctattaaaaaaaaaaaaaaaaaaa | |

[0217] TABLE 96

| | |
|---|---|
| cbe_1505425 HCDI | |
| HCDI protein | |
| length = 1522 | |
| agtcgctatgcgtgtcttgtgggtgagggagggcagaaagggagagtgctgggcgggctt | SEQ ID NO: 87 |
| agtcggagattgaggactgggaatccgcttccgggagggcactgtctagtgcacaggcaa | |
| cctggccttcgcctcctagcccgagaagccgaatctccctaatccctgtgacctgtgtca | |
| cctctgcatcgcgaggagggggataagtggggagaagtctggtgtcagatgggatggcgc | |
| cggaagagggtgccacagcggggacggaaggcgcccccaccccaactccacgggaatata | |
| aacaatttgtattttccgatcaggtggcgggacaggcttcattgggacagccctaaccca | |
| gctgctgaatgccagaggcacgaagtgacgttggtctcccgaaagcccgggcccggccgg | |
| atcacgtgggatgagctcgctgcatcggggctgccgagctgcgatgccgccgtcaacctg | |
| gccggagagaacatcctcaaccctctccgaagatggaatgaaaccttccaaaaagaggtt | |
| ctcggcagccgcctagagaccacccaattgctggctaaagccatcaccaaagccccacaa | |
| ccccccaaggcctgggtcttagtcacaggtgtagcttactaccagcccagtctgactgcg | |
| gagtatgatgaagacagcccaggaggggactttgactttttctccaacctcgtaaccaaa | |
| tgggaagctgcagccaggcttcctggagattctacacgccaggtggtggtgcgctcaggg | |
| gttgtgctgggccgtgggggtggtgccatgggccacatgctgctgccctttcgcctgggc | |
| ctggggggccccatcggctcaggccaccaattcttcccctggatacacatcggggacctg | |
| gcaggaatcctgacccatgcccttgaagcaaaccacgtgcacggggtcctgaatggagtg | |
| gctccatcctccgccactaatgctgagtttgcccagaccttgggtgctgccctgggccgc | |
| cgagccttcatccctctccccagcgctgtggtgcaagctgtctttgggcgacagcgtgcc | |
| atcatgctgctggagggccagaaggtgatcccacagcgaacactggccactggctaccag | |
| tattccttcccagagctaggggctgccttaaaggaaattgtagcctaagtaggtcgtggc | |
| aagggcctgaggcctgttcctcacaggcttccaggttaggcactgtgaataggctcagct | |
| cctctagagagctgaagccatctggttcttagattcctctcccagtcctctttcccattg | |
| ttctgttgctccaccttattgtctcaaggccgtaatctcatcaggttgggacattaatct | |
| tttcaactccttgtaagatttcccagtttggtttctctacatgtcctgcagctgccccac | |
| ttctcctttacgctgtgtagagaatgctctgcagtttaggcaataaaaataaattgtctc | |
| actaaaaaaaaaaaaaaaaaaa | |

[0218] TABLE 97

| | |
|---|---|
| cbe_1710 QP-C | |
| low molecular mass ubiquinone-binding protein (9.5 kD) | |
| length = 428 | |
| aaaaataagtaggaagtgctcaattttaatttggttcagttttccggagggcgagctgag | SEQ ID NO: 88 |
| ccctggccgccgccacaatgggccgcgagtttgggaatctgacgcggatgcggcatgtga | |
| tcagctacagcttgtcaccgttcgagcagcgcgcctatccgcacgtcttcactaaaggaa | |
| tccccaatgttctgcgccgcattcgggagtctttctttcgcgtggtgccgcagtttgtag | |
| tgttttatcttatctacacatgggggactgaagagttcgagagatccaagaggaggatcc | |
| agctgcctatgaaaatgacaaatgagcaacgcatccggatgacggttccctgtctctgaa | |
| agacctttctctggaagaggagtctgcattgtagtgtctcaaagacacaataaacttcct | |
| atggtctg | |

[0219] TABLE 98

cbe_1796502 CTNND2
catenin (cadherin-associated protein), delta 2 (neural plakophilin-related
arm-repeat protein)
length = 4746

| | |
|---|---|
| gccagcatcccttgtcccgcggccggctcagacaacaaaagcggaagatgctgcagttgg | SEQ ID NO: 89 |
| gcaaggtcaggaccttgccttgaaagccgggcggcgccgcgcaacgcctcttcccggact | |
| gaggagctgtcgccggcggagggtgcatgtttgcgaggaagccgccgggcgccgcgcctt | |
| tgggagctatgcctgttccagaccagccttcatcagcctcagagaagacgagttccctga | |
| gccccggcttaaacacctccaacggggatggctctgaaacagaaaccacctctgccatcc | |
| tcgcctcagtcaaagaacaggaattacagtttgaaaggctgacccgagagctggaggctg | |
| aacggcagatcgtagccagccagctggagcgatgcaagctcggatccgagactggcagca | |
| tgagcagcatgagttcagcagaagagcagtttcagtggcagtcacaagatggtcaaaaag | |
| atatcgaagatgagcttacaacaggtctcgagctggtggactcctgtattaggtcactac | |
| aggaatcaggaatacttgacccacaggattattctacaggtgaaaggcccagcctgctct | |
| cccagagtgcacttcagctcaattccaaacctgaagggtctttccagtatccggccagct | |
| accatagcaaccagaccctggccctgggggaaaccaccccttcacagctcccggcccgag | |
| gcacacaagcccgagctacgggccagagcttcagccagggcacgaccagccgcgccggcc | |
| acctggcggggcccgagcccgcgccgccgccgccgccgccgccgcgggagccgttcgcgc | |
| ccagcctgggcagcgccttccacctgcccgacgcgccgcccgccgccgccgccgccgcgc | |
| tctactactccagctccacgctgcccgcgccgccgcgcgggggctccccgctggccgcgc | |
| cccagggcggttcgcccaccaagctgcagcgcggcggctcggcccccgagggcgccacct | |
| acgccgcgccgcgcggctcctcgcccaagcagtcgcccagccgcctggccaagtcctaca | |
| gcaccagctcgcccatcaacatcgtcgtgtcctcggccggcctgtccccgatccgcgtga | |
| cctcgccccccaccgtgcagtccaccatctcctcctcgcccatccaccagctgagctcca | |
| ccatcggcacgtacgccaccctgtcgcccaccaagcgcctggtccacgcgtccgagcagt | |
| acagcaagcactcgcaggagctgtatgccacggccaccctccagaggccgggcagcctgg | |
| cagctggttcccgagcctcatacagcagccagcatgggcacctgggcccagagttgcggg | |
| ccctgcagtccccagaacaccacatagatcccatctatgaagaccgcgtctatcagaagc | |
| cccctatgaggagtctcagccagagccagggggaccctctgccgccagcacacaccggca | |
| cctaccgcacgagcacagccccatcttcccctggtgtcgactccgtccccttgcagcgca | |
| caggcagccagcacggcccacagaatgccgccgcggccaccttccagagggccagctatg | |
| ccgccggcccagcctccaattacgcggacccctaccgacagctgcagtattgtccctctg | |
| ttgagtctccatacagcaaatccggccctgctctcccgcctgaaggcaccttggccaggt | |
| ccccgtccattgatagcattcagaaagatcccagagaatttggatggagagacccggaac | |
| tgccggaagtgattcagatgttgcagcaccagtttccctcggtccagtctaacgcggcag | |
| cctacttgcaacacctctgttttggagacaacaaaattaaagccgagataaggagacaag | |
| gaggcatccagctcctggtggacctgttggatcatcggatgaccgaagtccaccgtagtg | |
| cctgtggagctctgagaaacctggtgtatgggaaggccaacgatgataacaaaattgccc | |
| tgaaaaactgtggtggcatcccagcactggtgaggttactccgcaagacgactgacctgg | |
| agatccgggagctggtcacaggagtcctttggaacctctcctcatgcgatgcactcaaaa | |
| tgccaatcatccaggatgccctagcagtactgaccaacgcggtgattatcccccactcag | |
| gctgggaaaattcgcctcttcaggatgatcggaaaatacagctgcattcatcacaggtgc | |
| tgcgtaacgccaccgggtgcctaaggaatgttagttcggccggagaggaggcccgcagaa | |
| ggatgagagagtgtgatgggcttacggatgccttgctgtacgtgatccagtctgcgctgg | |
| ggagcagtgagatcgatagcaagaccgttgaaaactgtgtgtgcattttaaggaacctct | |
| cgtaccggctggcggcagaaacgtctcagggacagcacatgggcacggacgagctggacg | |
| ggctactctgtggcgaggccaatggcaaggatgctgagagctctgggtgctggggcaaga | |
| agaagaagaaaaagaaatcccaagatcagtgggatggagtaggacctcttccagactgtg | |
| ctgaaccaccaaaagggatccagatgctgtggcacccatcaatagtcaaaccctacctca | |
| cactgctctctgagtgctcaaatccagacacgctggaaggggcggcaggcgccctgcaga | |
| acttggctgcagggagctggaagtggtcagtatatatccgagccgctgtccgaaaagaga | |
| aaggcctgcccatcctcgtggagctgctccgaatagacaatgaccgtgtggtgtgcgcgg | |
| tggccactgcgctgcggaacatggccttggacgtcagaaataaggagctcatcggcaaat | |
| acgccatgcgagacctagtccacaggcttccaggagggaacaacagcaacaacactgcaa | |
| gcaaggccatgtcggatgacacagtgacagctgtctgctgcacactgcacgaagtgatta | |
| ccaagaacatggagaacgccaaggccttacgggatgccggtggcatcgagaagttggtcg | |
| gcatctccaaaagcaaaggagataaacactctccaaaagtggtcaaggctgcatctcagg | |
| tcctcaacagcatgtggcagtaccgagatctgaggagtctctacaaaaaggatggatggt | |
| cacaataccactttgtagcctcgtcttcaaccatcgagagggaccggcaaaggccctact | |
| cctcctcccgcacgccctccatctcccctgtgcgcgtgtctcccaacaaccgctcagcaa | |
| gtgccccagcttcacctcgggaaatgatcagcctcaaagaaaggaaaacagactacgagt | |
| gcaccggcagcaacgccacctaccacggagctaaaggcgaacacacttccaggaaagatg | |
| ccatgacagctcaaaacactggaatttcaactttgtataggaattcttatggtgcgcccg | |
| ctgaagacatcaaacacaaccaggtttcagcacagccagtcccacaggagcccagcagaa | |
| aagattacgagacctaccagccatttcagaattccacaagaaattacgatgagtccttct | |
| tcgaggaccaggtccaccatcgccctcccgccagcgagtacaccatgcacctgggtctca | |
| agtccaccggcaactacgttgacttctactcagctgcccgtccctacagtgaactgaact | |
| atgaaacgagccactacccggcctcccccgactcctgggtgtgaggagcagggcacaggc | |
| gctccgggaacagtgcatgtgcatgcataccacaagacatttctttctgttttgtttttt | |
| tctcctgcaaatttagtttgttaaagcctgttccataggaaggctgtgataaccagtaag | |
| gaaatattaagagctattttagaaagctaaatgaatcgcaagttaacttggaaatcagta | |
| gaaagctaaagtgatcctaaatatgacagtgggcagcacctttctagcgtgagctgtaaa | |
| gtaacgagaagtgctttatactgaacgtggttgatgggaggagagacgaggcattcgggc | |
| cggtggggcgtaagggttatcgttaagcacaagacacagaatagtttacacactgtgtgg | |
| gggacggcttctcacgctttgtttactctcttcatccgttgtgactctaggcttcaggtt | |
| gcattggggttcctctgtacagcaagatgtttcttgccttttgttaatgcattgttgtaa | |
| agtatttgatgtacattacagattaaagaagaaaagcgcgttgtgtatattacaccaatg | |
| ccgccgtgtttcctcatctatggttctaaatattgcttcaatttcaaacttttgaaagat | |
| gtatggatttccagtttttctttactttctcccagtatgttttaacaaaaaaaaaaaaaa | |
| gcaggaaaaaaggaatatttagcagtattgttcgttctgatatgtgaatttgtctgtgac | |
| aactaaacaaggcattcagcagtttctgacaattaacatacatcattccacactccttgt | |
| caacaaagtgctttttcactgcctaaaattttagatgtagatatttgaaatagatttttt | |
| catttataccagttttctttatgatgatacagtgttaaaagaaaataaattacaattgat | |
| ctgtca | |

[0220] TABLE 99

| | |
|---|---|
| cbe_1807361 FLJ22729 | |
| hypothetical protein FLJ22729 | |
| length = 1278 | |
| aatggaggaagactggacctactgattcaacttggagatgagcgggtctgtcctcttcac | SEQ ID NO: 90 |
| ggcgggagagaggtggagatgctttctgaccccgtcgaggtcatccctgtactgggcctt | |
| acataatttctgctgtcggaaaaaatccactacacctaagaaaattactcccaatgttac | |
| tttttgtgatgaaaatgcaaaggagcccgaaaatgcacttgacaagctcttctcttcaga | |
| acagcaggcttccatcttgcatgtgttgaatacagcatctactaaagaacttgaagcttt | |
| ccgattgcttcgtggaagaaggtccatcaatatcgtagagcacagagaaaactttgggcc | |
| atttcagaatttagagagtttaatgaatgtgcccttgtttaagtataaaagtacagttca | |
| agtttgtaactccatactttgtccaaagactggacgggaaaaaagaaagtcaccggaaaa | |
| ccggttcctgagaaagctcctcaaaccagacatagaaagagaaagacttaagaattgcct | |
| gggctcaccttgatcgtaagttgacagtgctggactggcagcaaagtgaccgttggagtt | |
| taatgagaggaatatactcatcatcagtctatttagaagagatttcctcgatcatttcaa | |
| agatgcctaaagcagatttctatgttctggaaaaaacaggactatccattcagaactcat | |
| ctctgtttccaatactgttacattttcatatcatggaagccatgctgtatgccttattaa | |
| ataaaacttttgcccaggatgggcagcatcaggtgctgagcatgaatcgaaatgcagtgg | |
| ggaagcattttgaactgatgattggtgactcccggactagtggaaaagagctagtgaagc | |
| agtttctcttcgattctatactgaaggcggatcctcgggtgttcttcccatcagataaaa | |
| tagttcactacagacagatgtttttatctactgaactacaaagagtagaagagctttatg | |
| attcattattacaagctattgccttctatgaattagcagtgtttgactctcagccttaga | |
| attctgaggttaacgtgctaaagtataattattagctctaacgtaacaccaactgttgtg | |
| aacatccatgttattggaaaagaacacattttcagtgtattttagatgtttaaattctga | |
| cttttggctattaaatggtttacacaataagccaagaccaaatcaataaacattttatga | |
| gaaaaaaaaaaaaaaaaa | |

[0221] TABLE 100

| | |
|---|---|
| cbe_2253980 Prey1135 | |
| Homo sapiens, clone MGC: 14302, mRNA, complete cds. | |
| length = 1863 | |
| ggcacgaggcaggggctctgctgcgacctttacggtagtgaggttagggacgatgggaga | SEQ ID NO: 91 |
| gcagctttgttcctgaagtgccgtcgaggattaggatcgagtttcttcgatcgtgagggc | |
| aattattagtggcctctagccccccagatggcatcttgaggagagagaatccacgctacg | |
| agaactaacatagtggacatcgcagttgtccgtagccgatttgcgggttacggagttgtt | |
| gcaagtaaagaaggggaaatccgagcgttctcgcgttggatttcctccacgtgtgaagtg | |
| ggaatggtagtgatatctcgtgctatctctgtcaagggcaagaaggagaaggaatttatt | |
| tgaggccctacgacgtggtgcggtggctcacgcctgtaatcccaacactttgggaggccg | |
| aggcaggcggatcatctgagatcgagagttcgagaccagcttgaccaacatggagaaacc | |
| ccgtctctactaaaagtacaaaattagccaggcatggtggcacatgcccgtaatcccagc | |
| tactcgggaggctgaggcaggagagtagcttgagcccaggaggcggaggttgtggtgagc | |
| cgagatcgcgccattgcacagcctgggcaacgagcgaaactccatctcaaaaaaataaat | |
| aaaaatttttttaaaaaaaaaaaaaaaaaactcgaggcaaaactaaccccctaataaaat | |
| taattaaccactcattcatcgacctccccaccccatccaacatctccgcatgatgaaact | |
| tcggctcactccttggcgcctgcctgatcctccaaatcaccacaggactattcctagcca | |
| tgcactactcaccagacgcctcaaccgccttttcatcaatcgcccacatcactcgagacg | |
| taaattatggctgaatcatccgctaccttcacgccaatggcgcctcaatattctttatct | |
| gcctcttcctacacatcgggcgaggcctatattacggatcatttctctactcagaaacct | |
| gaaacatcggcattatcctcctgcttgcaactatagcaacagccttcataggctatgtcc | |
| tcccgtgaggccaaatatcattctgaggggccacagtaattacaaacttactatccgcca | |
| tcccatacattgggacagacctagttcaatgaatctgaggaggctactcagtagacagtc | |
| ccaccctcacacgattctttacctttcacttcatcttgcccttcattattgcagccctag | |
| cagcactccacctcctattcttgcacgaaacgggatcaaacaaccccctaggaatcacct | |
| cccattccgataaaatcaccttccacccttactacacaatcaaagacgccctcggcttac | |
| ttctcttccttctctccttaatgacattaacactattctcaccagacctcctaggcgacc | |
| cagacaattataccctagccaaccccttaaacacccctccccacatcaagcccgaatgat | |
| atttcctattcgcctacacaattctccgatccgtccctaacaaactaggaggcgtccttg | |
| ccctattactatccatcctcatcctagcaataatccccatcctccatatatccaaacaac | |
| aaagcataatatttcgcccactaagccaatcactttattgactcctagccgcagacctcc | |
| tcattctaacctgaatcggaggacaaccagtaagctacccttttaccatcattggacaag | |
| tagcatccgtactatacttcacaacaatcctaatcctaataccaactatctccctaattg | |
| aaaacaaaatactcaaatgggcctaaaaaaaaaaaaaaaaaaaaaaaaaaaaaaaaaaaa | |
| aaa | |

[0222] TABLE 101

| | |
|---|---|
| cbe_22607 Hs. 101882 | |
| 601276943F1 Homo sapiens cDNA, 5′ end | |
| length = 796 | |
| ccgcggccgctcgcagcttgctggcctctcccgcgcctcacgtcggactccgtctccgcg | SEQ ID NO: 92 |
| gcaggaagcagcatggaagctgaggacatccaggaggagttgacctgccccatctgcctg | |
| gactatttccaggacccggtgtccatcgagtgcggacacaacttctgccgcggctgcctg | |
| caccgcaacatgggcgccgggcggcaggaccgtatcccctgccccgaatgtcggcaccca | |
| tcggcgcccgccgcgctgcagacccaactgggccctggccaggctgactgagaagacgca | |
| gcgccggcgcctgggccccgtgcccccgggcctgtgcggccgccactgggagccgctgcg | |
| gctcttctgcgaggacgaccagcggccagtgtgcctggtgtgcagggagtcccaggagca | |
| ccagactcacgccatggcacccatcgacgaggcttcgagagctaccgggagaaacttctt | |
| aagtctcagcgtactctcgtggccaacgatgacgcacacgtcatgcatttacaggatgtc | |
| gacagtgacgaaccgccacacacgtggcaggataacgcatacggagtcacgcgaaatgag | |
| acatcacgcacggcgtttttaacagcgtggcaccacttcctggttgaagaacgaggacct | |
| gtctcttccagcagcttgcacaacgaagaagcacagaccagcacgacgctgaatgacacc | |
| acttcacactccgtccacttcgctcctgagaccctcttaaggggggacaacccgcccccc | |
| tgggcgtcacacccca | |

[0223] TABLE 102

| | |
|---|---|
| cbe_244811 DGUOK | |
| deoxyguanosine kinase | |
| length = 880 | |
| aacggtgcgctggagcgagtgagcagcgatacctagggcggaagtgctctcggcggaagt | SEQ ID NO: 93 |
| gatcgctgtgtgaatcgtgggtgggatggccgcgggccgcctctttctaagtcggcttcg | |
| agcacccttcagttccatggccaagagcccactcgagggcgtttcctcctccagaggcct | |
| gcacgcggggcgcgggccccgaaggctctccatcgaaggcaacattgctgtgggaaagtc | |
| cacgtttgtgaagttactcacgaaaacttacccagaatggcacgtagctacagaacctgt | |
| agcaacatggcagaatatccaggctgctggcacccaaaaagcctgcactgcccaaagtct | |
| tggaaacttgctggatatgatgtaccgggagccagcacgatggtcctacacattccagac | |
| attttcctttttgagccgcctgaaagtacagctggagcccttccctgagaaactcttaca | |
| ggccaggaagccagtacagatctttgagaggtctgtgtacagtgacaggctccactttga | |
| ggctctgatgaacattccagtgctggtgttggatgtcaatgatgatttttctgaggaagt | |
| aaccaaacaagaagacctcatgagagaggtaaacacctttgtaaagaatctgtaaccaat | |
| accatgaagttcaggctgtgatctgggctccctgactttctgaagctagaaaaatgttgt | |
| gtctcccaaccacctttccatccccagcccctctcatccctggagcactctgccgctcaa | |
| gagctggtttgttaattattgttagactttgccattgttttcttttgtacctgaagcatt | |
| ttgaaaataaagtttacttaagttatgcttgtttttctaa | |

[0224] TABLE 103

| | |
|---|---|
| cbe_250777 HPV 11 E4 | |
| Human papillomavirus 11 E4 | |
| length = 324 | |
| atggtagtaccaatcattgggaagtatgttatggcagcacagttatatgttctcctgcat | SEQ ID NO: 94 |
| ctgtatctagcactgtacgagaagtatccattgctgaacctactacatacacccccgcac | |
| agaccaccgcccctacagtgtccgcctgcaccacggaagacggcgtgtcggcgccgccta | |
| ggaagcgagcacgtggaccgtccactaacaacaccctgtgtgtggccaacatcagatccg | |
| tggacagtacaatcaacaacatcgtcactgacaattacaacaagcaccaaagaaggaaca | |
| actgtcacagtgcagctacgccta | |

[0225] TABLE 104

| | |
|---|---|
| cbe_250781 HPV 11 E2 | |
| Human papillomavirus 11 E2 | |
| length = 1104 | |
| atggaagcaatagccaagcgtttagatgcgtgccaggatcagttgttagaactttatgaa | SEQ ID NO: 95 |
| gaaaacagtattgatatacacaaacacattatgcattggaaatgcatacgattggaaagt | |
| gtattactacacaaagcaaaacaaatgggcctgagccacatcgggttacaagtagtacca | |
| ccattaactgtgtcagagactaaaggacataatgctattgaaatgcaaatgcatttagaa | |
| tccttagcaaaaactcagtatggtgtggaaccttggacattacaggacaccagttatgaa | |
| atgtggctaacaccacccaaacggtgctttaaaaaacagggaaatactgtggaggtaaaa | |
| tttgatggctgtgaagacaatgtaatggagtatgtggtatggacacatatatacctgcag | |
| gacaacgactcatgggtaaaagtaactagttccgtagatgccaagggcatatattataca | |
| tgtggacaatttaaaacatattatgtaaattttaataaagaggcacaaaagtatggtagt | |
| accaatcattgggaagtatgttatggcagcacagttatatgttctcctgcatctgtatct | |
| agcactgtacgagaagtatccattgctgaacctactacatacacccccgcacagaccacc | |
| gcccctacagtgtccgcctgcaccacggaagacggcgtgtcggcgccgcctaggaagcga | |
| gcacgtggaccgtccactaacaacaccctgtgtgtggccaacatcagatccgtggacagt | |
| acaatcaacaacatcgtcactgacaattacaacaagcaccaaagaaggaacaactgtcac | |
| agtgcagctacgcctatagtgcaactgcaaggtgattccaattgtttaaaatgttttaga | |
| tatagactgaatgacaaatataaacatttgtttgaattagcatcttcaacgtggcattgg | |
| gcctcacctgaggcaccacataaaaatgcaattgtaacattaacatatagcagtgaggaa | |
| caacgtcagcaatttttaaacagtgtaaaaataccacccaccattaggcataaggtgggg | |
| tttatgtcattacatttattgtaa | |

[0226] TABLE 105

| | |
|---|---|
| cbe_250808 HPV 11 E6 | |
| Human papillomavirus 11 E6 | |
| length = 453 | |
| atggaaagtaaagatgcctccacgtctgcaacatctatagaccagttgtgcaagacgttt | SEQ ID NO: 96 |
| aatctttctttgcacactctgcaaattcagtgcgtgttttgcaggaatgcactgaccacc | |
| gcagagatatatgcatatgcctataagaacctaaaggttgtgtggcgagacaactttccc | |
| tttgcagcgtgtgcctgttgcttagaactgcaagggaaaattaaccaatatagacacttt | |
| aattatgctgcatatgcacctacagtagaagaagaaaccaatgaagatattttaaaagtg | |
| ttaattcgttgttacctgtgtcacaagccgttgtgtgaaatagaaaaactaaagcacata | |
| ttgggaaaggcacgcttcataaaactaaataaccagtggaagggtcgttgcttacactgc | |
| tggacaacatgcatggaagacttgttaccctaa | |

[0227] TABLE 106

| | |
|---|---|
| cbe_250809 Prey152 | |
| PathCalling Prey Sequence 152 | |
| length = 515 | |
| cgcggccgcgtcgacgagagaactagtctcgagttttttttcaagtcttttccttttttt | SEQ ID NO: 97 |
| ttctattttcctggttgagctatttactatttatttagaagagttctttatataatcaga | |
| aacctttgtcagctgtatgtgctgccaatgtcttctcccacaacgtgggttgccttttca | |
| cattcttactgataacttttgataaaaagatgttcttaccattagtaaaacttattgtct | |
| ctcctttgagtactgattttgaatatcttttaagaaatctctgccttctcccaaattatg | |
| aagatattcttatatgttaccttataaactttattattttactttccatatgtaaattta | |
| taaatcatctgaaattgtttttgtcaaaggaatgagaaaacaaaattcttacttaaaaaa | |
| atagcccatccacaaagtcttactgattgataatacattcgttcattcttttcccattgc | |
| actgcagtattgaatttctgtgtttctctgagaat | |

[0228] TABLE 107

| | |
|---|---|
| cbe_250834 HPV 11 E7 | |
| Human papillomavirus 11 E7 | |
| length = 297 | |
| atgcatggaagacttgttaccctaaaggatatagtactagacctgcagcctcctgaccct | SEQ ID NO: 98 |
| gtagggttacattgctatgagcaattagaagacagctcagaagatgaggtggacaaggtg | |
| gacaaacaagacgcacaacctttaacacaacattaccaaatactgacctgttgctgtgga | |
| tgtgacagcaacgtccgactggttgtggagtgcacagacggagacatcagacaactacaa | |
| gaccttttgctgggcacactaaatattgtgtgtcccatctgcgcaccaaaaccataa | |

[0229] TABLE 108

| | |
|---|---|
| cbe_250883 Prey244 | |
| PathCalling Prey Sequence 244 | |
| length = 447 | |
| aaaaaaagaaaaagaaaattctgccttatatttccattgaataaaactgacattccagaa | SEQ ID NO: 99 |
| agctgcattgtgttttatcctgtggattcatcacttctgtgtaccaccagaggtctgcat | |
| agtctggtctgaaaactgctgatttaaggccgggcgcagtggctcatgcctgtaatccca | |
| gcactttggaaggtcgaggcgggcggatcacctgaggttcaggaattcgagaccagcctg | |
| gccgacatggcgaggccccaactctactaaaaatatggaaattaggcatggtggtgggcg | |
| cctgtaattccagctgctcgggagactgagacaggagaatcgcctgaacccggaaggcgg | |
| aggttgcagtgagccgagatcgtgccattgcactccagcctgggcaacaagagcaaaagt | |
| ccatctcaaaaaaaaaaaaaaaaaccc | |

[0230] TABLE 109

| | |
|---|---|
| cbe_250888 Prey228 | |
| PathCalling Prey Sequence 228 | |
| length = 507 | |
| aacagcttttcagataagaacaaggagcatagctttttcatcacagactctgatgcttct | SEQ ID NO: 100 |
| ggaggagatttttggagagaaagatcaggtgaacatacacaagaaaccaactcacctcat | |
| tcactgaaaaaggatgtagaaaatatggggaaagaagaacttcagaaggttttatttgaa | |
| caaatagatttacggagacgactggaacaagaattccaggtgttaaaaggaaacacatct | |
| ttcccagtattcaataattttcaggatcagatgaaaagggagctagcctaccgagaagaa | |
| atggtgcaacagttacaaattatcccctatgcagcaagtttgatcaggaaagaaaagctt | |
| ggcgcccatctcagcaaaagctaaaaggtgcacagaactacttactcttgttctcttgta | |
| agatacagcctgccatggagcacttctgacccgtgttaaagactgcagatcgaaagggct | |
| tgggaattaaatacaaaatcaggttca | |

[0231] TABLE 110

| | |
|---|---|
| cbe_250907 Prey372 | |
| PathCalling Prey Sequence 372 | |
| length = 183 | |
| gtactttgtagtttttcatccctactctctttaactggaaatatagaaattagcacattc | SEQ ID NO: 101 |
| atgtcaaacactgtccctttctgtcatgttctggatgagcaattaatcttgtttatactg | |
| aataaaattttatttgagttgtgaacataaaaaaaaaaaaaaaaaaaaaaaaaaaaccca | |
| aaa | |

[0232] TABLE 111

| | |
|---|---|
| cbe_250925 Prey415 | |
| PathCalling Prey Sequence 415 | |
| length = 448 | |
| cttagaggtagcagattgtcatatttgaatggaggatttgagtctgagaagtggctgaga | SEQ ID NO: 102 |
| gttattctgatacaaatagggtgtgcaatttttggtgagtcccattcatcagcttctaaa | |
| aaggagtagcagaaacacttgcacagcagcaggagttacttacccttcctgaatggctgc | |
| atcttcttaaggctgtttttttccctcctaaacagaaaatcatacattctgcaacaaaag | |
| ctggaaacatcctaaatgcctggaagcagtttagttttaagggttgaggccaggtgcggt | |
| ggcttggctgggcacagtggctcacacctgtaatcccagctactcaggaggctgaggcag | |
| gagaatcacttggaccagggaggtggaggttgcagtgagccaggattgtgccactgcact | |
| ccagcctgggcggcagagtgagactctc | |

[0233] TABLE 112

| | |
|---|---|
| cbe_251059 HPV 16 E1-E4 | |
| HPV 16 E1-E4 | |
| length = 276 | |
| atggctgatcctgcagcagcaacgaagtatcctctcctgaaattattaggcagcacttgg | SEQ ID NO: 103 |
| ccaaccaccccgccgcgacccataccaaagccgtcgccttgggcaccgaagaaacacaga | |
| cgactatccagcgaccaagatcagagccagacaccggaaacccctgccacaccactaagt | |
| tgttgcacagagactcagtggacagtgctccaatcctcactgcatttaacagctcacaca | |
| aaggacggattaactgtaatagtaacactacaccca | |

[0234] TABLE 113

| | |
|---|---|
| cbe_251063 HPV 16 E1 | |
| Human papillomavirus 16 E1 | |
| length = 1947 | |
| atggctgatcctgcaggtaccaatggggaagagggtacgggatgtaatggatggttttat | SEQ ID NO: 104 |
| gtagaggctgtagtggaaaaaaaaacaggggatgctatatcagatgacgagaacgaaaat | |
| gacagtgatacaggtgaagatttggtagattttatagtaaatgataatgattatttaaca | |
| caggcagaaacagagacagcacatgcgttgtttactgcacaggaagcaaaacaacataga | |
| gatgcagtacaggttctaaaacgaaagtatttgggtagtccacttagtgatattagtgga | |
| tgtgtagacaataatattagtcctagattaaaagctatatgtatagaaaaacaaagtaga | |
| gctgcaaaaaggagattatttgaaagcgaagacagcgggtatggcaatactgaagtggaa | |
| actcagcagatgttacaggtagaagggcgccatgagactgaaacaccatgtagtcagtat | |
| agtggtggaagtgggggtggttgcagtcagtacagtagtggaagtgggggagagggtgtt | |
| agtgaaagacacactatatgccaaacaccacttacaaatattttaaatgtactaaaaact | |
| agtaatgcaaaggcagcaatgttagcaaaatttaaagagttatacggggtgagtttttca | |
| gaattagtaagaccatttaaaagtaataaatcaacgtgttgcgattggtgtattgctgca | |
| tttggacttacacccagtatagctgacagtataaaaacactattacaacaatattgttta | |
| tatttacacattcaaagtttagcatgttcatggggaatggttgtgttactattagtaaga | |
| tataaatgtggaaaaaatagagaaacaattgaaaaattgctgtctaaactattatgtgtg | |
| tctccaatgtgtatgatgatagagcctccaaaattgcgtagtacagcagcagcattatat | |
| tggtataaaacaggtatatcaaatattagtgaagtgtatggagacacgccagaatggata | |
| caaagacaaacagtattacaacatagttttaatgattgtacatttgaattatcacagatg | |
| gtacaatgggcctacgataatgacatagtagacgatagtgaaattgcatataaatatgca | |
| caattggcagacactaatagtaatgcaagtgcctttctaaaaagtaattcacaggcaaaa | |
| attgtaaaggattgtgcaacaatgtgtagacattataaacgagcagaaaaaaaacaaatg | |
| agtatgagtcaatggataaaatatagatgtgatagggtagatgatggaggtgattggaag | |
| caaattgttatgtttttaaggtatcaaggtgtagagtttatgtcatttttaactgcatta | |
| aaaagatttttgcaaggcatacctaaaaaaaattgcatattactatatggtgcagctaac | |
| acaggtaaatcattatttggtatgagtttaatgaaatttctgcaagggtctgtaatatgt | |
| tttgtaaattctaaaagccatttttggttacaaccattagcagatgccaaaataggtatg | |
| ttagatgatgctacagtgccctgttggaactacatagatgacaatttaagaaatgcattg | |
| gatggaaatttagtttctatggatgtaaagcatagaccattggtacaactaaaatgccct | |
| ccattattaattacatctaacattaatgctggtacagattctaggtggccttatttacat | |
| aatagattggtggtgtttacatttcctaatgagtttccatttgacgaaaacggaaatcca | |
| gtgtatgagcttaatgataagaactggaaatcctttttctcaaggacgtggtccagatta | |
| agtttgcacgaggacgaggacaaggaaaacgatggagactctttgccaacgtttaaatgt | |
| gtgtcaggacaaaatactaacacatta | |

[0235] TABLE 114

| | |
|---|---|
| cbe_251071 Prey734 | |
| PathCalling Prey Sequence 734 | |
| length = 473 | |
| cgcggccgcgtcgacccggttcccgggaggatgaagttcgtgtacaaagaagagcatccg | SEQ ID NO: 105 |
| ttcgagaagcgccgctctgagggcgagaagatccgaaagaaatacccggaccgggtgccg | |
| gtgatagtagaaaaggctcccaaagctcggataggagacctggacaaaaagaaatacctg | |
| gtgccttctgatctcacagttggtcagttctacttcttgatccggaagcgaattcatctc | |
| cgagctgaggatgccttgtttttctttgtcaacaatgtcattccacccaccagtgccaca | |
| atgggtcagctgtaccaggaacaccatgaagaagacttctttctctacattgcctacagt | |
| gacgaaagtgtctacggtctgtgaagctgctgcccctgagctggaggggggtctcattct | |
| acaaagagagaggtggccccctttctgacctctcctccttcagctcaacacac | |

[0236] TABLE 115

| | |
|---|---|
| cbe_251088 HPV 16 E2 | |
| Human papillomavirus 16 E2 | |
| length = 1098 | |
| atggagactctttgccaacgtttaaatgtgtgtcaggacaaaatactaacacattatgaa | SEQ ID NO: 106 |
| aatgatagtacagacctacgtgaccatatagactattggaaacacatgcgcctagaatgt | |
| gctatttattacaaggccagagaaatgggatttaaacatattaaccaccaagtggtgcca | |
| acactggctgtatcaaagaataaagcattacaagcaattgaactgcaactaacgttagaa | |
| acaatatataactcacaatatagtaatgaaaagtggacattacaagacgttagccttgaa | |
| gtgtatttaactgcaccaacaggatgtataaaaaaacatggatatacagtggaagtgcag | |
| tttgatggagacatatgcaatacaatgcattatacaaactggacacatatatatatttgt | |
| gaagaagcatcagtaactgtggtagagggtcaagttgactattatggtttatattatgtt | |
| catgaaggaatacgaacatattttgtgcagtttaaagatgatgcagaaaaatatagtaaa | |
| aataaagtatgggaagttcatgcgggtggtcaggtaatattatgtcctacatctgtgttt | |
| agcagcaacgaagtatcctctcctgaaattattaggcagcacttggccaaccaccccgcc | |
| gcgacccataccaaagccgtcgccttgggcaccgaagaaacacagacgactatccagcga | |
| ccaagatcagagccagacaccggaaacccctgccacaccactaagttgttgcacagagac | |
| tcagtggacagtgctccaatcctcactgcatttaacagctcacacaaaggacggattaac | |
| tgtaatagtaacactacacccatagtacatttaaaaggtgatgctaatactttaaaatgt | |
| ttaagatatagatttaaaaagcattgtacattgtatactgcagtgtcgtctacatggcat | |
| tggacaggacataatgtaaaacataaaagtgcaattgttacacttacatatgatagtgaa | |
| tggcaacgtgaccaatttttgtctcaagttaaaataccaaaaactattacagtgtctact | |
| ggatttatgtctatatga | |

[0237] TABLE 116

| | |
|---|---|
| cbe_251128 Prey870 | |
| PathCalling Prey Sequence 870 | |
| length = 490 | |
| gaggagcaatgccctgatgccctcctccttcgctctctatgggctggcttcagctaccat | SEQ ID NO: 107 |
| ctgtacagctgcagctccaaaatctcttccacagtccacacctcccactcagctccagat | |
| cccatcactgctgccagctggtcatccccccgaaggaggctcagagtctacctcccaggc | |
| ccttggccactgagctcttggagagtcctctctccctgtgccctttgcagctccaccaac | |
| ccaaccaccagctccctcctccaagcctcacattctccacctccaggctttgatcaggca | |
| cagaacgcccttccatggaatgcccctccatgcctgtgtntccaacctactgaatctggt | |
| ggactgactgcccgaatctgagacttaggtcagaaggcacctctgtgaagcctgccatga | |
| cacattataacatgcgtcacattatagtttaccatttacacattcaaaaaaaaaaaaaaa | |
| aaaaaaaacc | |

[0238] TABLE 117

| | |
|---|---|
| cbe_251445 HPV 16 E6 | |
| Human papillomavirus 16 E6 | |
| length = 477 | |
| atgcaccaaaagagaactgcaatgtttcaggacccacaggagcgacccagaaagttacca | SEQ ID NO: 108 |
| cagttatgcacagagctgcaaacaactatacatgatataatattagaatgtgtgtactgc | |
| aagcaacagttactgcgacgtgaggtatatgactttgcttttcgggatttatgcatagta | |
| tatagagatgggaatccatatgctgtatgtgataaatgtttaaagttttattctaaaatt | |
| agtgagtatagacattattgttatagtttgtatggaacaacattagaacagcaatacaac | |
| aaaccgttgtgtgatttgttaattaggtgtattaactgtcaaaagccactgtgtcctgaa | |
| gaaaagcaaagacatctggacaaaaagcaaagattccataatataaggggtcggtggacc | |
| ggtcgatgtatgtcttgttgcagatcatcaagaacacgtagagaaacccagctgtaa | |

[0239] TABLE 118

| | |
|---|---|
| cbe_251448 HPV 16 E7 | |
| Human papillomavirus 16 E7 | |
| length = 297 | |
| atgcatggagatacacctacattgcatgaatatatgttagatttgcaaccagagacaact | SEQ ID NO: 109 |
| gatctctactgttatgagcaattaaatgacagctcagaggaggaggatgaaatagatggt | |
| ccagctggacaagcagaaccggacagagcccattacaatattgtaaccttttgttgcaag | |
| tgtgactctacgcttcggttgtgcgtacaaagcacacacgtagacattcgtactttggaa | |
| gacctgttaatgggcacactaggaattgtgtgccccatctgttctcagaaaccataa | |

[0240] TABLE 119

| | |
|---|---|
| cbe_251468 Prey1628 | |
| PathCalling Prey Sequence 1628 | |
| length = 486 | |
| gtcgacgcggccgcgggagctgatgggcagcctgcgccaccctggatcaccgtcactcgg | SEQ ID NO: 110 |
| cagaagcggagggggaccttggaccagccacccaaccaggaagacaagcctggggcactg | |
| accctgaagtctgaaccaggaaagcaagccaaggtgcccgagagaggccaggagcctgtg | |
| aagcaagctgactttgttcgcagcaagtctttcctgataacccctgtgaagcccgctgtg | |
| gaccggaagcagggggcaaagctcaacttcaaggaggggctgcaaagaggaatctcattg | |
| tcccatcagaacttggctcagtctgcagtgatgatggagaaggaactgcatcagctgaag | |
| agagccagttatgccagtacagatcagccatcctggatggaacttgccagaaagaaatct | |
| caagcttggagtgacatgccccagattataaaataggtgggcagtgtgctgataaagcat | |
| gtccac | |

[0241] TABLE 120

| | |
|---|---|
| cbe_251502 Prey1609 | |
| PathCalling Prey Sequence 1609 | |
| length = 506 | |
| ttccccgcctctcggctagctccggcctcccggggcttctgggtttggagagtttgggga | SEQ ID NO: 111 |
| gcggagacacctcccgaggctcctccgcgttggaccctatttgcgagggcgggagcgggg | |
| tgggccgacggcgaagctccagaggtgggaccctctcccttcagcagctcttcctgactt | |
| catgattctgcccctcttctcattgcaggtcacaccgacaaatctgaagcgggtttgcca | |
| ggggagtgtacccgtctccccagcctgggccacccggtccacagggattccatttccggc | |
| cttacactccgctccacgatctcatccaggcgctgcagctgtgcagctgctctacagact | |
| gcagggacctgctgagacgaatccccggacgaggtgatggctggaccggcggaggaggcg | |
| ggagcccattgtcccgagagcctgtggcctctgcctccgcaggtgtcaccaagagtgacc | |
| tacacacgagtgagcccagggcaggc | |

[0242] TABLE 121

| | |
|---|---|
| cbe_251663 HPV 11 E1 | |
| Human papillomavirus 11 E1 | |
| length = 1947 | |
| atggcggacgattcaggtacagaaaatgaggggtcggggtgtacaggatggtttatggta | SEQ ID NO: 112 |
| gaagccatagtagagcacactacaggtacacaaatatcagaagatgaggaagaggaggtg | |
| gaggacagtgggtatgacatggtggactttattgatgacaggcatattacacaaaattct | |
| gtggaagcacaggcattgtttaataggcaggaggcggatgctcattatgcgactgtgcag | |
| gacctaaaacgaaagtatttaggcagtccatatgtaagtcctataagcaatgtagctaat | |
| gcagtagaaagtgagataagtccacggttagacgccattaaacttacaacacagccaaaa | |
| aaggtaaagcgacggctgtttgaaacacgggaattaacggacagtggatatggctattct | |
| gaagtggaagctgcaacgcaggtagagaaacatggcgacccggaaaatgggggagatggt | |
| caggaaagggacacagggagggacatagagggtgagggggtggaacatagagaggcggaa | |
| gcagtagacgacagcacccgagagcatgcagacacatcaggaatattagaattactaaaa | |
| tgtaaggatatacgatctacattacatggtaagtttaaagactgctttgggctgtcattt | |
| gttgatttaattaggccatttaaaagtgatagaaccacatgtgccgattgggtggttgca | |
| ggatttggtatacatcatagcatagcagatgcatttcaaaagttaattgagccattaagt | |
| ttatatgcacatatacaatggcttacaaatgcatggggaatggtactattagtattaata | |
| aggtttaaagtaaataagagcagatgtaccgtggcacgtacattaggtacgttattaaat | |
| atacctgaaaatcacatgttaattgagcctcctaaaatacaaagtggcgtacgagccctg | |
| tattggtttaggacaggcatttcaaatgcaagtacagttataggggaggcgccggaatgg | |
| ataacgcgccagaccgttattgaacatagtttggctgacagtcaatttaaattaactgaa | |
| atggtgcagtgggcatatgataatgatatttgtgaagaaagtgagatagcatttgaatat | |
| gcacagcgtggagactttgactccaatgcaagggcctttttaaatagtaatatgcaggct | |
| aaatatgtaaaagattgtgcaattatgtgcagacattataaacatgcagaaatgaaaaag | |
| atgtctattaaacaatggattaagtataggggtactaaagttgacagtgtaggtaactgg | |
| aagccaattgtgcagtttctaagacatcaaaacatagaatttattccatttttaagcaaa | |
| ctaaaattatggctgcacggaacgcccaaaaaaaattgtatagccattgtagggccacct | |
| gacactgggaagtcgtgcttttgcatgagtttaattaagtttttggggggaacagttatt | |
| agttatgttaattcctgcagccatttctggctacagccactaacggatgcaaaagtggca | |
| ttattggatgatgccacacaaccatgttggacatatatggatacatatatgagaaaccta | |
| ttagatggtaatcctatgagcatagatagaaaacatagagcattaacattaattaagtgt | |
| ccaccgctactggttacatcaaatatagacattagcaaagaggagaaatacaaatattta | |
| catagtagagttaccacatttacatttccaaatccattcccctttgacagaaatgggaat | |
| gcagtatatgaactatcagatgcaaactggaaatgtttctttgaaagactgtcgtccagc | |
| ctagacattgaggattcagaggacgaggaagatggaagcaatagccaagcgtttagatgc | |
| gtgccaggatcagttgttagaacttta | |

[0243] TABLE 122

| | |
|---|---|
| cbe_251737 HPV 16 L2 | |
| Human papillomavirus 16 L2 | |
| length = 1422 | |
| atgcgacacaaacgttctgcaaaacgcacaaaacgtgcatcggctacccaactttataaa | SEQ ID NO: 113 |
| acatgcaaacaggcaggtacatgtccacctgacattatacctaaggttgaaggcaaaact | |
| attgctgtacaaatattacaatatggaagtatgggtgtattttttggtgggttaggaatt | |
| ggaacagggtcgggtacaggcggacgcactgggtatattccattgggaacaaggcctccc | |
| acagctacagatacacttgctcctgtaagaccccctttaacagtagatcctgtgggccct | |
| tctgatccttctatagtttctttagtggaagaaactagttttattgatgctggtgcacca | |
| acatctgtaccttccattcccccagatgtatcaggatttagtattactacttcaactgat | |
| accacacctgctatattagatattaataatactgttactactgttactacacataataat | |
| cccactttcactgacccatctgtattgcagcctccaacacctgcagaaactggagggcat | |
| tttacactttcatcatccactattagtacacataattatgaagaaattcctatggataca | |
| tttattgttagcacaaaccctaacacagtaactagtagcacacccataccagggtctcgc | |
| ccagtggcacgcctaggattatatagtcgcacaacacaacaggttaaagttgtagaccct | |
| gcttttgtaaccactcccactaaacttattacatatgataatcctgcatatgaaggtata | |
| gatgtggataatacattatatttttctagtaatgataatagtattaatatagctccagat | |
| cctgactttttggatatagttgctttacataggccagcattaacctctaggcgtactggc | |
| attaggtacagtagaattggtaataaacaaacactacgtactcgtagtggaaaatctata | |
| ggtgctaaggtacattattattatgatttaagtactattgatcctgcagaagaaatagaa | |
| ttacaaactataacaccttctacatatactaccacttcacatgcagcctcacctacttct | |
| attaataatggattatatgatatttatgcagatgactttattacagatacttctacaacc | |
| ccggtaccatctgtaccctctacatctttatcaggttatattcctgcaaatacaacaatt | |
| ccttttggtggtgcatacaatattcctttagtatcaggtcctgatatacccattaatata | |
| actgaccaagctccttcattaattcctatagttccagggtctccacaatatacaattatt | |
| gctgatgcaggtgacttttatttacatcctagttattacatgttacgaaaacgacgtaaa | |
| cgtttaccatattttttttcagatgtctctttggctgcctag | |

[0244] TABLE 123

| | |
|---|---|
| cbe_251740 HPV 1a E1-E4 | |
| Human Papillomavirus 1a E1-E4 | |
| length = 375 | |
| atggcagataataaagctccccaagggctgctggggctcctgcagtacactccgactacc | SEQ ID NO: 114 |
| caaccctatccgagagtgacaccgcccagcaatcgacgtccatcgactacaccgaactcc | |
| caggacagggggagacctcgcaggtccgacaaagacagcagaaaacacctgtacgcagac | |
| ggccttacggacggcgaagatccagaagtcccagaggtggaggacgaagagaaggagaat | |
| caacgccctctaggacacccggatctgtcccttctgcgcgagacgttggaagtatacaca | |
| caacgcctcaaaagggacattcttcaagacttagacgacttctgcaggaagcttgggatc | |
| cacccgtggtctgtg | |

[0245] TABLE 124

| | |
|---|---|
| cbe_251784 HPV 16 L1 | |
| Human papillomavirus 16 L1 | |
| length = 1596 | |
| atgcaggtgacttttatttacatcctagttattacatgttacgaaaacgacgtaaacgtt | SEQ ID NO: 115 |
| taccatattttttttcagatgtctctttggctgcctagtgaggccactgtctacttgcct | |
| cctgtcccagtatctaaggttgtaagcacggatgaatatgttgcacgcacaaacatatat | |
| tatcatgcaggaacatccagactacttgcagttggacatccctattttcctattaaaaaa | |
| cctaacaataacaaaatattagttcctaaagtatcaggattacaatacagggtatttaga | |
| atacatttacctgaccccaataagtttggttttcctgacacctcattttataatccagat | |
| acacagcggctggtttgggcctgtgtaggtgttgaggtaggtcgtggtcagccattaggt | |
| gtgggcattagtggccatcctttattaaataaattggatgacacagaaaatgctagtgct | |
| tatgcagcaaatgcaggtgtggataatagagaatgtatatctatggattacaaacaaaca | |
| caattgtgtttaattggttgcaaaccacctataggggaacactggggcaaaggatcccca | |
| tgtaccaatgttgcagtaaatccaggtgattgtccaccattagagttaataaacacagtt | |
| attcaggatggtgatatggttcatactggctttggtgctatggactttactacattacag | |
| gctaacaaaagtgaagttccactggatatttgtacatctatttgcaaatatccagattat | |
| attaaaatggtgtcagaaccatatggcgacagcttatttttttatttacgaagggaacaa | |
| atgtttgttagacatttatttaatagggctggtactgttggtgaaaatgtaccagacgat | |
| ttatacattaaaggctctgggtctactgcaaatttagccagttcaaattattttcctaca | |
| cctagtggttctatggttacctctgatgcccaaatattcaataaaccttattggttacaa | |
| cgagcacagggccacaataatggcatttgttggggtaaccaactatttgttactgttgtt | |
| gatactacacgcagtacaaatatgtcattatgtgctgccatatctacttcagaaactaca | |
| tataaaaatactaactttaaggagtacctacgacatggggaggaatatgatttacagttt | |
| atttttcaactgtgcaaaataaccttaactgcagacgttatgacatacatacattctatg | |
| aattccactattttggaggactggaattttggtctacaacctcccccaggaggcacacta | |
| gaagatacttataggtttgtaacccaggcaattgcttgtcaaaaacatacacctccagca | |
| cctaaagaagatgatccccttaaaaaatacactttttgggaagtaaatttaaaggaaaag | |
| ttttctgcagacctagatcagtttcctttaggacgcaaatttttactacaagcaggattg | |
| aaggccaaaccaaaatttacattaggaaaacgaaaagctacacccaccacctcatctacc | |
| tctacaactgctaaacgcaaaaaacgtaagctgtaa | |

[0246] TABLE 125

| | |
|---|---|
| cbe_251790 Prey2347 | |
| PathCalling Prey Sequence 2347 | |
| length = 313 | |
| gagacaccagcactagccagcaggtgccccttcctcaggcttctgagtttcagccccatg | SEQ ID NO: 116 |
| cgatcactcctccaagcttctaggttttaataattccaacttttccccctttgtccctca | |
| gaggtggtagctgcttccagaaattgctaccttcatgataccacagagttctcttttttg | |
| ctttttgagttcttcgataactagttaatgattccttatacttagctaaccattctctat | |
| attaaattctctctgttaaaacaaaaaaaaaaaaaaaaaaaaaaaaaaaaaaaaaaaaaa | |
| aaaaccaaaaaaa | |

[0247] TABLE 126

| | |
|---|---|
| cbe_251821 Prey2419 | |
| PathCalling Prey Sequence 2419 | |
| length = 439 | |
| ctgaaatgcacatacatgctttagtgtaatgcagaatgcatttattggagaactcataaa | SEQ ID NO: 117 |
| catcctataaaattttcttccctgagatgcaactataaaacttggccttattctgagaat | |
| gcttaacatagatttcatccatactgtaacactgattttgttgttgttgtccttaaagca | |
| gctcagcttcctgaggtagtgttatgtctctgtggcaacaaggtgaaaatgtctagctta | |
| ttttgtcaaagtcaacaataatccacagactccagacctcaatatctgtcccaatttgcc | |
| attttactttagtgctccaaaaatatggcttatagaaaaaacaataggtgttttaaagag | |
| atttacctgaatgatatagagaatgtctagatattttctggctatcaggtaaaacctacc | |
| cttcaagatggtagaatat | |

[0248] TABLE 127

| | |
|---|---|
| cbe_251826 Prey2429 | |
| PathCalling Prey Sequence 2429 | |
| length = 553 | |
| ctttcagcagcagcggtagagcagtgaccaggcgtctccgcgatgggccccggggacttc | SEQ ID NO: 118 |
| cgccgctgcagagagagaatttcccaggggctccagggactcccaggtagagcggagctt | |
| tggttcccacctcgtcccgcgtgcgacttcttcggggacggcaggagcacggacatccag | |
| gaggaggccctcgccgccagcccgctgctggaggacctcagacgacggctgacgcgcgcc | |
| ttccagtgggcggtgcagcgcgcgatctcgaggcgcgtgcaggaggcggcggcggcggcg | |
| gcggcgcgggaggagcagagctggacgggcgttgaggccaccctggccaggctgcgggcg | |
| gagctggtggaaatgcatttccaaaaccaccagctggctagaactttactggacctaaac | |
| atgaaagtgcagcaattgaaaaaggagtatgaactggaaattacatcagactcccaaagc | |
| ccaaaagatgatgctgcgaatccggaatanagaaatgcacacgcaagggctgggcgcggt | |
| ggctcacgcctgg | |

[0249] TABLE 128

| | |
|---|---|
| cbe_251857 Prey2492 | |
| PathCalling Prey Sequence 2492 | |
| length = 54 | |
| ggatcagacattcgcgggacgagatcgacccaacgagggagcgcaacctgcctc | SEQ ID NO: 119 |

[0250] TABLE 129

| | |
|---|---|
| cbe_251900 Prey2598 | |
| PathCalling Prey Sequence 2598 | |
| length = 410 | |
| tggcgtgcggctttcgccgcgctattgcttgccaggtatggatcccggagcgcgcagagg | SEQ ID NO: 120 |
| agtccctgaggagctagggaccccaaaggcctttcaccgctgcgggccagtcctcagtca | |
| gctggagggtgggtcccacggaatcctgttagtttctaccacctcctcccccttctctgg | |
| agctggtggagcttcagaagtcctgtggagcgtcggctgggatcagtttgtctcggtgaa | |
| aagtaaactttgaaagctttccagagtgttgaatcttccaccagaaaacttgatcacatc | |
| aatatctgcagttccaatttcccaaaaagaagaagtagctgattttcagctttctgtgga | |
| ttctttattggaaaaagacaatgaccattcagaccagatatcaagtcaag | |

[0251] TABLE 130

| | |
|---|---|
| cbe_251917 HPV 1a E2 | |
| Human Papillomavirus 1a E2 | |
| length = 1206 | |
| atggaaaacctcagcagtcgcttagacttactgcaagagcagctaatgaacctatatgaa | SEQ ID NO: 121 |
| caggacagtaaattgatagaagatcaaattaagcagtggaatctaattagacaagaacaa | |
| gttcttttccatttcgccagaaaaaatggggtaatgagaattggattgcaggcagttcca | |
| tctttagcgtcctcacaggagaaggcaaagacagctattgaaatggtgttacatttagag | |
| tctttaaaggactcaccttatggcacagaggattggtcacttcaagacactagcagagag | |
| ctgtttttggcacccccagctggcaccttcaagaagagtggcagcacacttgaggttacc | |
| tatgacaataaccctgataatcagacaaggcacacaatttggaatcatgtgtattatcaa | |
| aatggggacgatgtatggagaaaagtatccagtggtgttgatgctgtaggagtgtactat | |
| ttagaacacgatggctataaaaattattatgtgttatttgctgaggaggcctctaagtac | |
| agcacaacaggacaatatgctgtaaattacaggggtaaaaggtttacaaatgttatgtct | |
| tccactagctccccaagggctgctggggctcctgcagtacactccgactacccaacccta | |
| tccgagagtgacaccgcccagcaatcgacgtccatcgactacaccgaactcccaggacag | |
| ggggagacctcgcaggtccgacaaagacagcagaaaacacctgtacgcagacggccttac | |
| ggacggcgaagatccagaagtcccagaggtggaggacgaagagaaggagaatcaacgccc | |
| tctaggacacccggatctgtcccttctgcgcgagacgttggaagtatacacacaacgcct | |
| caaaagggacattcttcaagacttagacgacttctgcaggaagcttgggatccacccgtg | |
| gtctgtgtaaaagggggtgccaatcagcttaagtgtctcaggtacagacttaaagcatct | |
| actcaagttgactttgacagcataagcaccacatggcattggacagatagaaaaaacacc | |
| gagaggataggtagtgctagaatgttagtaaagtttattgatgaggctcaacgagagaag | |
| tttcttgagagagttgctttgcccagatcagtgtctgtgtttttgggacagtttaatggg | |
| tcttaa | |

[0252] TABLE 131

| | |
|---|---|
| cbe_251919 HPV 1a E6 | |
| Human Papillomavirus 1a E6 | |
| length = 423 | |
| atggcgacaccaatccggaccgtcagacagctttccgaaagcctctgtatcccatatatt | SEQ ID NO: 122 |
| gatgttttattgccttgtaatttttgtaattattttttgtctaatgctgagaagctgctt | |
| tttgatcattttgatttgcatcttgtctggagagacaatttggtgtttggatgctgtcaa | |
| gggtgtgctagaactgttagcctattggagtttgttttatattatcaggagtcttatgag | |
| gtaccggaaatagaagaaattttggacagacctttattgcaaattgaactccgttgtgtt | |
| acatgcataaaaaaactgagtgttgctgaaaaattggaggttgtgtcaaacggagaaaga | |
| gtgcatagagttagaaacagacttaaagcaaagtgtagtttgtgtcgcttgtatgctata | |
| taa | |

[0253] TABLE 132

| | |
|---|---|
| cbe_251925 HPV 1a E7 | |
| Human Papillomavirus 1a E7 | |
| length = 282 | |
| atggtgggcgaaatgccagcactaaaggacctggttcttcaacttgaaccaagcgtccta | SEQ ID NO: 123 |
| gatttagatctttattgttacgaggaggtgcctcctgatgacatagaggaggagttagtg | |
| tcgcctcagcaaccttatgctgtcgttgcttcctgtgcctattgcgagaaactggttcga | |
| ttgaccgtcctcgcggatcacagcgccattagacagctggaggaactccttctgcgatct | |
| ttgaacatcgtgtgcccactgtgcaccctacagcgacagtaa | |

[0254] TABLE 133

| | |
|---|---|
| cbe_251929 Prey2672 | |
| PathCalling Prey Sequence 2672 | |
| length = 408 | |
| gtctctacaaataataaaaaattgtctgggcatggtggcctgtgcccgtagtcccagcta | SEQ ID NO: 124 |
| ctcaggagggtgaggtgggaggatcgcttgggcctaggaggtcaagcctgcagtgagttg | |
| taatcacgccactgcactccagcctgggcaacacagcgagatcctatttctcctatttct | |
| ctctgtctctctcacacacacacacacacacaaacacacacataatgtggaatgattaaa | |
| caaagctaattaacatatcggtcacctcctttaatttttccagcaagacatgtgaaattt | |
| attcttttagcctattttgaaatacatgtcatatatcattattaactatagtcaccctgg | |
| tgtgcgatggatctcaaaaacttattttttctgtctaactcaaacttt | |

[0255] TABLE 134

| | |
|---|---|
| cbe_251953 Prey2724 | |
| PathCalling Prey Sequence 2724 | |
| length = 617 | |
| ggccgactcccaggatccgttgcggcgcggcggagcagccaatggcgagccccacagtct | SEQ ID NO: 125 |
| cgcgagagtgctcaggcgctcttcgtggctgccctcttagctgctagcggagctcctcag | |
| ggggcggccgggagcctacaattcctagaaagaaaatacgccattccggaaacagaactg | |
| cagttaagaccctcgaaaagatctaagatagtgtgcatcctataacacctgacgaatttc | |
| agaatgtgacaaagcgcagaggatgcattatttcaaaacaaaacagaaggctaaaatttg | |
| cagganaaagaaaatcagtaaaccgggaatcctcggactggattgtaagcaagatttgaa | |
| tgaattagaagctgaaggtatttaggctgtgatataganggtacatatttcatcccacag | |
| agaaaacataatactcgaaatttcgtgaaaaacgcaaactgtcggaaatctcctcagtcc | |
| gactaatgcgcgcttgacatgcgatgtgaatgccctctgtcggcgctgtcgctgacgcac | |
| atctgtccgtggtcgtctatcgatatgtgttgtgttatgctgtgtctatcgcgtcgctgt | |
| cactgtccggttgcctt | |

[0256] TABLE 135

| | |
|---|---|
| cbe_251976 FLJ23584 | |
| hypothetical protein FLJ23584 | |
| length = 4992 | |
| ggctatcctactgcagctggctgcatcagatgtgccaggcctgccctctagctcccaaca | SEQ ID NO: 126 |
| ccatctgcctgatctaagctttgccatgttgttgtcactgctgggtgcctgtgctgtggt | |
| ggggccattccatggccctgagtgggagccagtgcagggcctgctctcccagaatcacag | |
| ctgcagggaccctcagtgctgtggcaacctgcttgtcctctgcctctttctggtctggca | |
| ggtccggcactgttggcaccaggtcaccaggacccgcttcagcacaaggaatgtcatcaa | |
| ggtgccactgcagaagcgggcagtgccctccatgaggtgcgaaactgtcttcaagctgac | |
| tcctgaattcttcagtcctggaaagtccaggggcctagattctcaacaatgcgcacaaag | |
| gcagagatggggataccggaggagcctccaggaatcatgggcccagaacctgctctctcc | |
| acagcacccatgtccaggcccaccttcgggtgtccacacccactctgagcccatcttttg | |
| taccacctccatttcaaacacctgtttactgcctcagaacagttcctggaaagcatggca | |
| ggtgccttggtgtctccatgatggtcagactcgccctgccttggacatgtgtcaagagat | |
| ggagcagctgctgcttcactcacaggaaaggttggtgtcactggagcctgtcatcagtgt | |
| gaggtctcgccccacctccatgaccttaaccacctctcttccaaacttactttcagctga | |
| gaggctgcagttctgcccccagagagctcctgcctgatccttcccaccaaacactgagaa | |
| tgtgcacttggaagtcttggcactgtcgaccagaggcctgggaaccagggggtaaaaacc | |
| agaaagcaggcagagaggatagtagagagacccaggctccaaggtgggtgaaccagacag | |
| ggagcagacgggaggatgcttcagaaatccaggcatctggggagtagttcccagtagact | |
| ttggaatggagggtgatgcagagactaacgtgttggagtgtgcaaaccagagactagtaa | |
| taagtgaaactgatggcgagatcttgacaccagggtgggacacccaggaccggatgggag | |
| ttgagagtagaaccaacattcaggaactagggaatagaaaccagagggaggctggaggtg | |
| agaatctccctgaaacccaggcacatatgggagagaaccaagaacagttaagatgtaaaa | |
| ttgatgcagagacccaaacacctgagtgggagaaccaggataagaatggaagtgaggatg | |
| ctgtggagacccagacatttgagaagaaggacaagaaagaggctggagaggaggatgggg | |
| aagagatccaggctcaaggattggggaagcaaggccagactggagatgagaatggtgagg | |
| agacccagacaccacagtgggagaaacaagatcagatgaaaggtgatgcggatgtggaaa | |
| ttcagatggaagaggggagaaacaaggatcaggttggaggtcaggatgctgcacaaaccc | |
| aatcatgtgggagggagaacgtgggagaagtaaaaaaagagaatagtgtagagacccagg | |
| ccttggattggggaaaacaggaatgtgttggaaatgggaatgttacagagatccagacac | |
| caaggtgggagaagcatgatcaaggtggaagtaagaaagctaagaagacccaagcatctg | |
| ggggagagaaccagaaacaattaagtcatgaaattcaagtggggtggggaaataagggcc | |
| tgagaagagatgaagatgctaaggaaacccagatagctaccaagaagaagctcagggaga | |
| taagagaaggattgggtggtgatccaggcactatggtggggaaaccggagacaagtagca | |
| agtgaaatttatagagaatttgagatactatgttgggagaatcagaactggattggaggt | |
| gaacatagagcagaaattcaggcatcagagaagagagaccaaagaaaggatggatgtgag | |
| gatggcacaaatatcctggcacccgaggctgagatccaggaacaattaaaaggtgaaact | |
| gatgtggagactcagagcaatgagccacttagagaagaggatggtacagacattcagtca | |
| ctagggaggagagaggttaaaggtgaggatgataaagacacccaggaacttgggaggaaa | |
| aatcagggtcagttaggaaatgaatttagtggaaagattcacataccaaaggggaagaat | |
| caggaacatattagaggcgaagatggtgcacatacccagatatctgagtcagggaactgg | |
| ggcaaattaacaagtcaaattgatggagaaatgcattcagcagaatggaagaaagatcag | |
| cagattggaggtgagaatggggcagaaattcagatacaagggaagagaaacctgagagaa | |
| gttggaggtgaggacggtgtaaagacctgggcacctgggaaagaaacccagagtcagttt | |
| agaagtgatcttggtagaaagatccttttatcagagtggaagagccagaagcagatggga | |
| agtgagaatggaacagaaattcaggctccagtggagagaaaccagagagaacctggaggt | |
| gaggacggtgtaaagactcagagacctaagagagagaacgaggaccagttagatagtgaa | |
| attggagggagccattcaccagggaggaggaactgggagctgattggaaaggatgttgca | |
| gaaaatcaggcatcagagaagagaaaccagagagaggttggaaacgaggacggtagaatg | |
| atctggaggcttaggggaaaaaactggaggcttagagcgaagaaacagactgttaaaaag | |
| taaagataatggaaagacccgtttatcagagtggaagaaccaggaacagggtggaggtgg | |
| gaatgatgaagaaattcaaatacaggggaagagaaacctgagagggaccacagctgatga | |
| tggtacagagacccaggctcctgcaggagatgaccagggacagttaagagttgaaattgc | |
| tgaagagatccaggtacaagggcaaggaaataagaatgacggtggagttgaggatgttgc | |
| agaactccaggatataggaagccagagaaagtgcacagatgaggatgttggagagcctcg | |
| agcaccaaggggaggaaacaaggatctggtcagaggagaggatgctgtgagggacagtct | |
| ccaagtcgactgttctgggagtgagaggcccacaggcaggaagcacagcctaccatggcc | |
| tccagccttcactggctatggatgtgggacccgggaacaggaacaggcagtggctgtgaa | |
| tggtttcatctctgccccctgtcctgagatgaatcctgtcccccactggggtgaagtctt | |
| cctgctggtgggtggggagggagagcatctggccagccagggcacaacccctgccaggga | |
| tcatagagtggggatcagtccagcctcccagcaggcccaacctgaatcctggagaagacg | |
| acaaagggacaaaggggtggatccagagaaggcccccagcctgactcggcagtcccaaaa | |
| ccctccgtctctgacagctcccttgggcatgccctctgcctgctcctgtctcccgtgtgg | |
| cccagccccggaagctgccatcattctagcgggtcctcccaccgccctcactgtcctgcc | |
| caaggggacaggcctcaagaagagcaaacgactgctcctggagtccctcatgcggaggag | |
| gattgcacacctgaagtggggtcttccccggcggatcctggagtcctatttcctgtttaa | |
| cttcttaggatcttgctcattgacccttgctggggcgaggctctctggactgaacacagg | |
| ccaggagctccaagcccagcaggaaaggtattgtgaggcccaaggctccccaccaggcct | |
| taagtccccagagaggttccagagggttcagcgcccagacagaaaaagctcgaaacttcc | |
| tatacaagccagagctctggagaggaacagaccgcacatgtcagagcccattaagcattt | |
| ccatccagcctgaaaaggccaggagagtcaggccaccagggggcgccagagaaccacagg | |
| agatccaggaagcgcttgctaggaccaagctcccagctcccaggacccccaggccggcag | |
| cggagtccaggagctggtgtggcccacaaagggtcggagagcctcccagtgagaacagta | |
| ggggcaggaaaatgatcaggtcaagggtctcccagctggcagagagggctcccagcagag | |
| tgaggacttcattctctagggcagaccacgcccactggaggaaggaatgtacatcctggg | |
| aggcctctaagctccccagactcaaatgccagcagctcacatactggagaagaggaagcc | |
| tggaatctacagggtgcagaggggctgggcagcagccttcctgccattctgcagaacctg | |
| tcagcttcaaagggaggctccactctgcggtggcaaagctgggcctgacccttctggcca | |
| agatgtcctggtccccacagctcgccaagcgcaagcacttggcccctaacctgagcctga | |
| gggaacctgattctactctgcctcccaaagtgggtgatcctcgtgcaggggaggacagca | |
| tcggagatcacactgcttcacagagggatcttcagctgcaaggtcactgctgtactgggg | |
| ccacccttcctaagacagagagtccccagggccaggaggcacctgggaacccaaatgggg | |
| ctccacagaatacacgagcctccaaaaagtttagtattatgaagcatctgaatttttttt | |
| ctcttccagaatggctttaaaaagtagactcaggcccagagtcctcaggacatatcagaa | |
| aagctttgagagtgtcctgatccctgcaaagcctctaataaattggtcatttgggcaaaa | |
| aaaaaaaaaaaa | |

[0257] TABLE 136

| | |
|---|---|
| cbe_252016 HPV 1a L1 | |
| Human Papillomavirus 1a L1 | |
| length = 1527 | |
| atgtataatgtttttcagatggctgtctggttaccagcgcagaataagttctatcttcct | SEQ ID NO: 127 |
| ccccagcccatcactagaatcctgtccactgatgaatatgtaaccagaaccaatctcttc | |
| taccatgcaacatctgaacgtctactgctggtcggacatcctttgtttgagatctccagt | |
| aatcaaactgtaactataccaaaagtgtcaccaaatgcatttagagtttttagggtgcgt | |
| tttgctgatccaaatagatttgcatttggggataaggcaatttttaatccagaaacagaa | |
| agattagtttggggcctaagagggatagagataggtagaggccagcctttaggtatagga | |
| ataacgggccaccctcttttaaataagttagatgatgcagaaaatccaacaaattatatt | |
| aatactcatgcaaatggagattctagacaaaatactgcttttgatgcaaaacagacacaa | |
| atgttcctcgtcggctgtactcctgcttcaggtgaacactggacaagtagtcgttgccca | |
| ggggaacaagtgaaacttggggactgccccagggtgcaaatgatagagtctgtcatagaa | |
| gatggtgacatgatggatattggttttggggctatggattttgctgctttacagcaagac | |
| aagtctgatgtccctttagatgttgttcaagcaacatgcaaatatcctgattatatcaga | |
| atgaaccatgaagcctatggcaactctatgtttttttttgcacgtcgcgagcaaatgtat | |
| accaggcacttttttactcgcgggggttcggtgggtgataaggaggcagtcccacaaagc | |
| ctgtatttaacagcagatgctgaaccaagaacaactttagcaacaacaaattatgtaggc | |
| acaccaagtggctctatggtttcatctgatgtccaattgtttaatagatcttactggctt | |
| cagcgatgtcaaggccagaataatggcatttgctggagaaaccagttatttattacagtt | |
| ggagataataccagaggaacaagtttatctatcagtatgaaaaacaatgcaagtactaca | |
| tattccaatgctaattttaatgattttctaagacatactgaagaatttgatctttctttt | |
| atagttcagctttgtaaagtaaagttaactcccgaaaatctagcctacattcatacaatg | |
| gaccctaatattttagaggattggcaactatctgtatctcaaccacctaccaatcctcta | |
| gaagatcaatataggtttttagggtcttccttggcagcaaaatgtccagaacaggcgcct | |
| cctgagccccagactgatccttatagtcaatataaattctgggaagtcgatctcacagaa | |
| aggatgtccgaacaattagaccaatttccactaggaaggaaatttctatatcaaagtggc | |
| atgacacaacgtactgctactagttccaccacaaagcgcaaaacagtgcgtgtatctacg | |
| tcagccaagcgcaggcgtaaggcttag | |

[0258] TABLE 137

| | |
|---|---|
| cbe_252041 HPV 1a L2 | |
| Human Papillomavirus 1a L2 | |
| length = 1524 | |
| atgtatcgcctacgtagaaaacgcgctgcccccaaagatatatacccctcatgcaaaata | SEQ ID NO: 128 |
| tcaaacacctgcccacctgacattcaaaataaaattgagcatacaacaattgctgataaa | |
| atattgcaatatggcagtctgggagtttttttgggaggtttgggcattggaacagccaga | |
| ggctctggaggaagaattggttatactcccctcggtgagggtggtggggttagagttgct | |
| actcgtccaactccagtaaggcctacaatacctgtggaaacagtaggccccagtgaaatt | |
| ttccccatagatgttgtagatcctacaggccctgctgttattcccctacaagatttaggt | |
| agagacttcccaataccaactgtgcaggttattgcagaaattcaccctatttctgacata | |
| ccaaacattgttgcatcttcaacaaatgaaggagaatctgccatattagatgtgttacga | |
| gggaatgcaaccatacgcactgtttcaagaacacaatacaataacccctctttcactgtt | |
| gcatctacatctaatataagtgctggagaagcatcaacatcagatattgtatttgttagc | |
| aatggttcaggtgacagggtggtgggcgaggatatccccttggtagaattaaacttaggc | |
| cttgaaacagacacatcttctgttgtacaagaaacagcattttccagcagcacaccaatt | |
| gctgaaagaccctcttttaggccctcaagattctataataggcgtctatatgaacaggtg | |
| caagtacaagaccctaggttcgttgagcagccacagtcaatggtcacttttgataatcca | |
| gcatttgagccagagcttgatgaggtgtctattatcttccaaagagacttagatgctctt | |
| gctcagacaccagtgcctgaatttagagatgtagtttatctgagcaagcccacattttcg | |
| cgggaaccagggggacggttaagggttagccgccttggcaaaagttcaactattcgtaca | |
| cgcctgggcacagcaattggcgccagaacccactttttctatgatttaagttctattgct | |
| ccagaagactcaattgaattattgcctttaggtgagcatagtcaaacaacagtcattagt | |
| tccaacttaggtgacacagcatttatacaaggtgagacagcagaggatgacttagaagtt | |
| atctctttagaaacaccacaattatattcagaagaagagcttttagacacaaacgaaagt | |
| gtgggcgaaaatttgcaacttactattactaactcagagggtgaggtttctatactagat | |
| ttaacacaaagcagagtcaggccaccttttggcactgaagatactagcttgcatgtatat | |
| tacccaaattcttctaaagggactccaataattaatcctgaagaatcatttacacctttg | |
| gttattatagctcttaacaactcaacaggggattttgagttacatcctagtcttagaaag | |
| cgtcgtaaaagagcttatgtataa | |

[0259] TABLE 138

| | |
|---|---|
| cbe_252090 Prey2820 | |
| PathCalling Prey Sequence 2820 | |
| length = 535 | |
| gagcagcacattccacccatgctgagagccactggttgctcccagcttggtctgtatcct | SEQ ID NO: 129 |
| cctgagcagctcccaccccctgaaatgctttggagaagaaagaagaggaggccatgtttg | |
| gaaggaatgcagcagcagggccttgggggagtccccgcccgggtgagggctgtcacttac | |
| cacctggaggacctaagaaggcgtcagagcatcatcaacgaactgaagaaggcccagtgg | |
| ggcagctctggggctgcatctgagccagtggtgcttggcgaagagggctgtggattcccc | |
| agcaccaatgaataccctgatctggaagaggagagagcaacctatccacaggaagaggac | |
| cgttttctcactcctggcagggcccagctgctttggtctccctggagccccctggatcag | |
| gaggaggcttgtgcctccaggcagctgcactctctggcctcgttcagcactgtcacagcc | |
| agaaggaacccccttcacaatccctgggggatggagttggcagcgtctgaagagt | |

[0260] TABLE 139

| | |
|---|---|
| cbe_2685998 Prey2313 | |
| Homo sapiens, clone IMAGE: 3625550, mRNA, partial cds. | |
| length = 1922 | |
| gcgccatctgcctcgattacttcacggaccccgtgtccatcggctgcgggcacaacttct | SEQ ID NO: 130 |
| gccgagtttgtgtaacccagttgtggggtggggaggatgaggaggacagagatgagttag | |
| atcgggaggaggaggaggaggacggagaggaggaggaagtggaggctgtgggggctggcg | |
| cggggtgggacacccccatgcgggatgaagactacgagggtgacatggaggaggaggtcg | |
| aggaggaagaagagggtgtgttctggaccagtggcatgagcaggtccagctgggacaaca | |
| tggactatgtgtgggaggaggaggacgaggaggaagacctggactactacttgggggaca | |
| tggaggaggaggacctgaggggggaggatgaggaggacgaggaggaagtgctggaggagg | |
| ttgaggaagaggatctagaccccgtcaccccactgcccccgcctccagcccctcggaggt | |
| gcttcacatgccctcagtgccgaaagagctttcctcggcggagcttccgccccaacctgc | |
| agctggccaatatggtccaggtgattcggcagatgcacccaacccctggtcgagggagcc | |
| gcgtgaccgatcagggcatctgtcccaaacaccaagaagccctgaagctcttctgcgagg | |
| tagacgaagaggccatctgtgtggtgtgccgagaatccaggagccacaaacagcacagcg | |
| tggtgccattggaggaggtggtgcaggagtacaaggccaaactgcaggggcacgtggaac | |
| cactgaggaagcacctggaggcagtgcagaagatgaaagccaaggaggagaggcgagtga | |
| cagaactgaagagccagatgaagtcagagctggcagcggtggcctcggagtttgggcgac | |
| tgacacggtttctggctgaagagcaggcagggctggaacggcgtctcagagagatgcatg | |
| aagcccagctggggcgtgcgggagccgcggctagtcgccttgcagaacaggccgcccagc | |
| tcagccgcctgctggcagaggcccaggagcggagccagcaggggggtctccggctgctcc | |
| aggtgtgaagaggtacagctgcagcccccagaggtctggtcccctgacccgtgccaaccc | |
| catagccatgacttcctgacagatgccatcgtgaggaaaatgagccggatgttctgtcag | |
| gctgcgagagtggacctgacgctggaccctgacacggctcacccggccctgatgctgtcc | |
| cctgaccgccggggggtccgcctggcagagcggcggcaggaggttgctgaccatcccaag | |
| cgcttctcggccgactgctgcgtactgggggcccagggcttccgctccggccggcactac | |
| tgggaggagcctaaagaaccctcctggcctccagctcagccttctctcacctactatgtc | |
| tgtccaacagaccggccagaatttagcttcacttgagagagatctggaatggtcgccatg | |
| attgaaaccacgcaccattacatcatcattacattaattacatcaacataaattatttct | |
| tcccccttcccttttccagcactcaaccaaggagcaaagctcatcccaccccacacccct | |
| cccaggtctgctcactgccaggctcctctcccctttgttcagtggagctggcttttctcc | |
| cagcccctttccatgcctttcactccatttggcaagctctgagggggagcctggggacgg | |
| gtttgggtccccaggaggagagccttgggtataatctatttttctaggagcctcttgcct | |
| tgtcacttgcagctttcgccctctgctttgatggctgaggtgaactcatgttctttggga | |
| aaagggaaggcgtgctgtggaaataaaatgtttatttgcttctcaaaaaaaaaaaaaaaa | |
| aa | |

[0261] TABLE 140

| | |
|---|---|
| cbe_2693325 Prey1673 | |
| Prey1673, 194 bp. | |
| length = 194 | |
| tgtacactgccgcaatgtgggtgcagagctgagggactgagctggggcaccagggtgggc | SEQ ID NO: 131 |
| agattggcatgagggagagaggaggacctcaagttgggaagagaggcaaagtcagcactg | |
| gagacagggagtgaaggaagagctgaaggattcagctcctggccagatagttgggatgat | |
| gctcttttagatct | |

[0262] TABLE 141

| | |
|---|---|
| cbe_2789381 Prey775 | |
| AL523176 LTI_NFL003_NBC3 Homo sapiens cDNA clone CS0DC001YA04 3 prime, mRNA | |
| sequence (AL523176.1: 98%/1043, p = 0.000000), 1498 bp. | |
| length = 1498 | |
| tactggagggccgggtcccagcctggatgttacccaaccccatgacggaccctttcattg | SEQ ID NO: 132 |
| cagcgatctgcacacgtgtgggtgtttccataggacattgtcaggcacagatggctggtc | |
| cgaagcacgtgcatttcagttttgaggctcctgtcctcaggcagtgtggactcaggccct | |
| gggagtcatgtggatgccagtagcctgggcccacagagctgctgggatgtggggggcata | |
| tcaagttgaagatggcaactctgatctgacgcctctgtgctcagggcccctggaggaggg | |
| gctactgccccttggcccttagacaacaggacagagaccagagggactgggcggcttgtc | |
| ccaggctactgggctgtggtctctgaccccctggaggcctccccacgcctcacagaacac | |
| agtgcagacggtgggcggggagagctcgaggggaggcccagccctgcaggtgggactggc | |
| tctccctccccagccacgagtatgccacagggggctttcaaaaccaggcagggccaagcc | |
| ttggccccactggaggtagagcaccttctgtggctcccgggtgcctttaggcccgtccag | |
| gagttggagcagaggagaagacccagactgtgcatagttccctgaggagggctagcctca | |
| ggtgccacagcctggttcggcctggcggccccaggacgcagcagcaaccttgggcttcct | |
| gcggggtgactaccttgccctccggccctgcccgttgactaactatgctctgtggttttg | |
| tttccagagaactcagattgcacagagctagactcgggcagccagagcggcgagctgagt | |
| aacaggggtaacacctccctgctgcccctccctctctctccctctctctccctctctctt | |
| taccctccccagggctccatctccgcctcaggggcttctccaccccaagtctggctccat | |
| tcctggccttctgttggtgacagacccccccctaaggtgctcgtttgggggctcttcagg | |
| cagcacctcagcctggcacccccactcccctgcacagcccccaggcctcaggaccccacc | |
| cctctgaggcccaggggagccctgttcacgctggtttctccccaggacccatgagcttcc | |
| tggctggcctgggccttgctgtgggactggccctgctcctgtactgctatccgccagacc | |
| ccaagggcctgccagggacccggcgcgtcctcggtttctcgcctgtcatcatcgacagac | |
| atgtcagccgctacctgctggccttcctggcagatgacctaggggggctctgacagaccc | |
| tggacccagggcctcacctgccactcaaccaaagagtcctcgagccggcccgccaagggg | |
| actgctgcttctttttctaaatgcatatttttcattatttataatttgtgtaaaaaacac | |
| accttcaccttacaaggtgctgaccatattaaatgttcaggttctctcaaaaaaaaaa | |

[0263] TABLE 142

| | |
|---|---|
| cbe_2826346 RPS10 | |
| ribosomal protein S10 | |
| length = 598 | |
| ctccttcttttccagccccggtaccggaccctgcagccgcagagatgttgatgcctaaga | SEQ ID NO: 133 |
| agaaccggattgccatttatgaactcctttttaaggagggagtcatggtggccaagaagg | |
| atgtccacatgcctaagcacccggagctggcagacaagaatgtgcccaaccttcatgtca | |
| tgaaggccatgcagtctctcaagtcccgaggctacgtgaaggaacagtttgcctggagac | |
| atttctactggtaccttaccaatgagggtatccagtatctccgtgattaccttcatctgc | |
| ccccggagattgtgcctgccaccctacgccgtagccgtccagagactggcaggcctcggc | |
| ctaaaggtctggagggtgagcgacctgcgagactcacaagaggggaagctgacagagata | |
| cctacagacggagtgctgtgccacctggtgccgacaagaaagccgaggctggggctgggt | |
| cagcaaccgaattccagtttagaggcggatttggtcgtggacgtggtcagccacctcagt | |
| aaaattggagaggattcttttgcattgaataaacttacagccaaaaaaccttaaaaaa | |

[0264] TABLE 143

| | |
|---|---|
| cbe_2830508 Prey292051 | |
| Homo sapiens, clone MGC: 12344, mRNA, complete cds. | |
| length = 769 | |
| catcaccccataaacaaataggtttggtcctagcctttctattagctcttagtaagatta | SEQ ID NO: 134 |
| cacatgcaagcatccccgttccagtgagttcaccctctaaatcaccacgatcaaaaggga | |
| caagcatcaagcacgcagcaatgcagctcaaaacgcttagcctagccacacccccacggg | |
| aaacagcagtgattaacctttagcaataaacgaaagtttaactaagctatactaacccca | |
| gggttggtcaatttcgtgccagccaccgcggtcacacgattaacccaagtcaatagaagc | |
| cggcgtaaagagtgttttagatcaccccctccccaataaagctaaaactcacctgagttg | |
| taaaaaactccagttgacacaaaatagactacgaaagtggctttaacatatctgaacaca | |
| caatagctaagacccaaactgggattagataccccactatgcttagccctaaacctcaac | |
| agttaaatcaacaaaactgctcgccagaacactacgagccacagcttaaaactcaaagga | |
| cctggcggtgcttcatatccctctagaggagcctgttctgtaatcgataaaccccgatca | |
| acctcaccacctcttgctcagcctatataccgccatcttcagcaaaccctgatgaaggct | |
| acaaagtaagcgcaagtacccacgtaaagacgttaggtcaaggtgtagcccatgaggtgg | |
| caagaaatgggctacattttctaccccagcaacaatatactctgccggc | |

[0265] TABLE 144

| | |
|---|---|
| cbe_2898065 Prey1620 | |
| Homo sapiens, DKFZP434F162 protein, clone MGC: 21493 IMAGE: 3871231, mRNA, | |
| complete cds. | |
| length = 2156 | |
| gagctgaagagacctggagccgacagacgggtgaaggccatgccgccttctgggaaagtt | SEQ ID NO: 135 |
| ccccgaaaggagaatctgtggctacagtgtgagtgggggtcctgctcctttgtgtgctca | |
| accatggaaaagttctttgagcatgtcactcagcacctgcagcagcacctgcatggctct | |
| ggggaggaggaggaagaggaagaggaggatgacccacttgaggaagaattctcctgcttg | |
| tggcaggaatgtggcttttgttctctggactgttctgctgacctcatccgccatgtctac | |
| ttccactgctaccacaccaagctgaaacagtgggggctgcaggccttgcaaagccaggct | |
| gaccttggcccctgcatcctggacttccagagccggaacgtcatccctgatatccctgac | |
| cacttcctgtgtctgtgggagcactgtgagaattccttcgacaatcctgagtggttttat | |
| cggcatgtggaagcacacagtctgtgctgtgaatacgaagcagtcggcaaggacaacccg | |
| gtggtgctgtgtggctggaaaggctgtacctgcaccttcaaggaccgcagtaaacttcga | |
| gagcacctccgcagccatacccaggagaaagtggtagcctgccccacctgtgggggcatg | |
| tttgccaacaataccaagttcttagatcacatccgtcgccagacctcattggatcagcag | |
| cacttccagtgttctcactgttccaagagatttgccacagagcggctattgcgggaccac | |
| atgcgcaaccatgtgaatcactataagtgccctctgtgtgacatgacctgcccgctgcct | |
| tcctccctccgcaaccacatgcgctttcgtcacagtgaggaccggccctttaaatgtgac | |
| tgttgtgactacagctgcaagaatcttattgacctccagaagcacctggatacccacagc | |
| gaggagccagcctacaggtgtgattttgagaactgcaccttcagtgcccgatccctctgc | |
| tctatcaagtcccattaccgcaaagtacatgaaggagactctgagccaaggtacaaatgt | |
| catgtgtgtgacaaatgcttcacacggggcaacaacctcaccgtgcaccttcgcaagaag | |
| caccagttcaagtggccctcagggcatccccgttttcggtacaaggaacatgaagatggc | |
| tatatgcggctgcagctggttcgctacgagagtgtagagctgacacagcaactgctgcgg | |
| caaccacaagagggatcgggcctgggaacgtcgctgaacgagagcagcctgcagggcatt | |
| attctagaaacagtgccaggggagccaggacgtaaggaagaggaagaggagggcaagggt | |
| agcgaagggacagccctctcagcctctcaggacaaccccagttctgtcatccacgtggtg | |
| aatcagaccaatgcccaaggccagcaagagattgtctactatgtgctgtctgaagcccca | |
| ggggagcctcccccagtccctgagccaccttcagggggcatcatggaaaagcttcaagga | |
| atagctgaggagccagagatccagatggtttgaaggccgcagagccagaccatttcttcc | |
| ccaggtcctgaagtttgagccaggcaagtggcagtgcccctagtgggcagccgttgccaa | |
| tggatgcctttaggagtggtgccgagagcagtgtggtccactctggcctgggtttgcatc | |
| attctgcagactctaaagacttcccttttctgccagactacattttgtggggagcctgag | |
| gactctggattctttgaggggatcctggatgtgtgtgttcttgttaaagaggctgttatc | |
| aggcttaactataaccctcaagatctgcttgacagtgattaaatccttagctcacatcca | |
| ttcccatctttcgggctccttaggcccaaggatggcatgtgactggtccctgcaagggtc | |
| ctttctttgtcaccagccaaggcattgataaccaagtagccattttcctcttaaggtttc | |
| ctctacaaccccaaggactttcatgattatcctcagggacaggattggaggcattgagcg | |
| tgtttattaacaagatgtttttggtaataaaaaaaaaaaaaaaaaaaaaaaaaaaa | |

[0266] TABLE 145

| | |
|---|---|
| cbe_3001381 IRF1 | |
| interferon regulatory factor 1 | |
| length = 2035 | |
| cgagccccgccgaaccgaggccacccggagccgtgcccagtccacgccggccgtgcccgg | SEQ ID NO: 136 |
| cggccttaagaaccaggcaacctctgccttcttccctcttccactcggagtcgcgctccg | |
| cgcgccctcactgcagcccctgcgtcgccgggaccctcgcgcgcgaccagccgaatcgct | |
| cctgcagcagagccaacatgcccatcactcggatgcgcatgagaccctggctagagatgc | |
| agattaattccaaccaaatcccggggctcatctggattaataaagaggagatgatcttcc | |
| agatcccatggaagcatgctgccaagcatggctgggacatcaacaaggatgcctgtttgt | |
| tccggagctgggccattcacacaggccgatacaaagcaggggaaaaggagccagatccca | |
| agacgtggaaggccaactttcgctgtgccatgaactccctgccagatatcgaggaggtga | |
| aagaccagagcaggaacaagggcagctcagctgtgcgagtgtaccggatgcttccacctc | |
| tcaccaagaaccagagaaaagaaagaaagtcgaagtccagccgagatgctaagagcaagg | |
| ccaagaggaagtcatgtggggattccagccctgataccttctctgatggactcagcagct | |
| ccactctgcctgatgaccacagcagctacacagttccaggctacatgcaggacttggagg | |
| tggagcaggccctgactccagcactgtcgccatgtgctgtcagcagcactctccccgact | |
| ggcacatcccagtggaagttgtgccggacagcaccagtgatctgtacaacttccaggtgt | |
| cacccatgccctccacctctgaagctacaacagatgaggatgaggaagggaaattacctg | |
| aggacatcatgaagctcttggagcagtcggagtggcagccaacaaacgtggatgggaagg | |
| ggtacctactcaatgaacctggagtccagcccacctctgtctatggagactttagctgta | |
| aggaggagccagaaattgacagcccagggggggatattgggctgagtctacagcgtgtct | |
| tcacagatctgaagaacatggatgccacctggctggacagcctgctgaccccagtccggt | |
| tgccctccatccaggccattccctgtgcaccgtagcagggcccctgggcccctcttattc | |
| ctctaggcaagcaggacctggcatcatggtggatatggtgcagagaagctggacttctgt | |
| gggcccctcaacagccaagtgtgaccccactgccaagtggggatgggcctccctccttgg | |
| gtcattgacctctcagggcctggcaggccagtgtctgggtttttcttgtggtgtaaagct | |
| ggccctgcctcctgggaagatgaggttctgagaccagtgtatcaggtcagggacttggac | |
| aggagtcagtgtctggctttttcctctgagcccagctgcctggagagggtctcgctgtca | |
| ctggctggctcctaggggaacagaccagtgaccccagaaaagcataacaccaatcccagg | |
| gctggctctgcactaagcgaaaattgcactaaatgaatctcgttccaaagaactacccct | |
| tttcagctgagccctggggactgttccaaagccagtgaatgtgaaggaaactcccctcct | |
| tcggggcaatgctccctcagcctcagaggagctctaccctgctccctgctttggctgagg | |
| ggcttgggaaaaaaacttggcactttttcgtgtggatcttgccacatttctgatcagagg | |
| tgtacactaacatttcccccgagctcttggcctttgcatttatttatacagtgccttgct | |
| cggggcccaccaccccctcaagccccagcagccctcaacaggcccagggagggaagtgtg | |
| agcgccttggtatgacttaaaattggaaatgtcatctaaccattaagtcatgtgtgaaca | |
| cataaggacgtgtgtaaatatgtacatttgtctttttataaaaagtaaaattgtt | |

[0267] TABLE 146

| | |
|---|---|
| cbe_3056756 KIAA0440 | |
| signal-induced proliferation-associated 1 like 1 | |
| length = 6028 | |
| ggtgtggacgttgtctaaatttcggtagccatggcacaagaatataagaaagcatgggat | SEQ ID NO: 137 |
| tatggcaaccacagaatctcagtagtacaagttccattcagttttttctgaaagaaagcc | |
| ctctgttaaagtgaagcaaagaaactgttgtggattataacgtttagaagttccaatttt | |
| tcagtgctttacaaataaagcatcatttaaccttttaaatgaaaaagattaagatctcat | |
| gcaactgttgtattttctggaagccattctccaaaagggaagtgcacatttaaaacacag | |
| atatgatggtccttgctgcagggatttaagtctacttgcttttacatcatgaccagcttg | |
| aaacggtcacagacagaaaggcctcttgccactgacagggcctctgttgttggcacagac | |
| ggcacccccaaagtccacactgatgatttctacatgcggcgcttccggtcccaaaatggc | |
| agcttaggatcatcagttatggctcctgtaggacccccccgaagtgaaggttctcaccat | |
| ataacctcaacccccggagtcccaaaaatgggggtaagggcaaggattgcagattggccc | |
| ccaagaaaggaaaacataaaagaatctagccgttcaagccaggaaatagaaacctcaagt | |
| tgccttgatagcctgtcctccaaaagcagtcctgtgagtcagggaagttctgttagcctc | |
| aattccaatgactcagccatgctgaaaagcatacagaacacgctgaaaaacaagacaaga | |
| ccgtcggagaacatggactccagatttctcatgcctgaagcctaccccagctcccccaga | |
| aaagctcttcgcagaatacgccagcgaagcaacagtgatatcaccataagtgaacttgat | |
| gtggatagctttgatgaatgtatctcacctacatacaagactggaccatcactgcacagg | |
| gaatatggtagcacatcttcaattgataaacagggaacatctggagaaagcttttttgat | |
| ttgttaaagggctacaaagatgacaaatctgatcgaggtccaactccaaccaagctcagt | |
| gactttctcattactggtggtggcaagggttctggtttctctttggatgtaatagacggg | |
| cctatctcacagagagagaacctcaggctttttaaggaaagggaaaaaccactcaagcga | |
| cgttcaaaatctgaaactggagactcctctatttttcgtaaattgcgcaatgccaaaggt | |
| gaagaacttgggaagtcatcagatcttgaagataaccgatcagaagactctgtcaggccc | |
| tggacatgtccaaagtgctttgcccactatgatgtccagagtatattatttgatttgaat | |
| gaggcaattatgaacaggcacaatgttattaagaggagaaacaccaccactggagcttcc | |
| gcagctgccgtggcatccttggtctctggacctctgtctcattcagccagttttagctcc | |
| ccaatgggcagcacagaggacctgaattccaaaggaagcctcagcatggaccagggagat | |
| gataaaagcaatgagcttgtaatgagctgtccatattttcggaatgagataggtggagaa | |
| ggggagaggaaaatcagcctttcaaaatcaaattctggctcctttagtggatgtgaaagt | |
| gcctcctttgagtctacccttagttcccattgcacaaatgcaggagtggcagtacttgaa | |
| gtgcccaaggagaacttggtgttgcacctagatagagtgaaaagatacatcgtggaacac | |
| gtagatctgggtgcatactattatagaaaatttttctaccagaaggaacactggaactat | |
| tttggggctgatgagaatcttggtccagtggctgtgagcattcgaagggaaaaaccagat | |
| gaaatgaaagaaaatggatctccgtacaactaccgaataatttttagaactagtgagctc | |
| atgacactgagaggttcggtcctggaggacgccattccgtcgacagccaagcactcgaca | |
| gccagaggcctgcctctcaaagaagtgctggagcacgtggttcctgagctcaatgtccag | |
| tgcctgcggttggccttcaacacacccaaggtcacagagcagctcatgaaactggatgaa | |
| caagggctgaactaccagcagaaagtaggcatcatgtactgcaaagctggacagagcact | |
| gaagaagagatgtacaacaatgagtcagctggcccagcctttgaagaattccttcaacta | |
| ttgggagagcgagttcggctcaaaggatttgagaagtatcgagcacagcttgataccaaa | |
| actgactccactggaacccattctctgtacacaacatacaaagattatgaaattatgttc | |
| catgtttctaccatgctgccatacacacccaacaacaaacaacagctcctgaggaagcgg | |
| cacattggaaatgatatcgtaacaattgttttccaagagcctggagcacagccattcagc | |
| ccaaaaaacatccgatcccacttccagcacgttttcgtcatcgtcagggtgcacaatccg | |
| tgctctgacagtgtctgttatagtgtggctgttaccaggtccagagatgtgccttccttt | |
| gggcctcccattcctaaaggggtcactttccctaagtcaaatgtgttcagggacttcctt | |
| ttggcgaaagtgattaatgcagaaaatgctgctcataaatcggagaagtttcgggccatg | |
| gcaactcggacccgccaggaatacctgaaagatctggcagaaaagaatgtcaccaacacc | |
| cctatcgacccttctggcaagtttccgttcatctctctggcttccaagaagaaggaaaag | |
| tctaagccatatccaggagccgagctcagcagcatgggggccattgtatgggcagtccgg | |
| gctgaagactacaacaaggccatggaactagactgccttttagggatctccaatgagttc | |
| attgtgctcattgaacaggaaacaaagagcgtggtcttcaattgttcctgtagagatgtg | |
| atagggtggacttcaactgacaccagcctcaaaatcttctatgaacgaggagaatgtgtt | |
| tcagtgggtagttttattaacattgaggagatcaaagagattgtcaaaaggttgcagttt | |
| gtttcaaaaggctgtgaatcggtggagatgactctgcgaagaaatgggctaggacagctt | |
| ggcttccatgtcaactatgagggcattgtggcggatgtggagccctacggttatgcctgg | |
| caggcagggctgaggcagggcagtcgcctggtggagatctgcaaggtggcggtagccact | |
| ctgagccatgagcagatgatcgacctcctgagaacatctgtcacggtgaaggttgtcatc | |
| attcccccgcatgatgactgcaccccgcggaggagttgctctgaaacctaccgcatgcca | |
| gtgatggagtacaaaatgaatgaaggtgtttcatacgaattcaagtttcccttccgaaat | |
| aataacaagtggcagaggaacgccagcaaggggcctcattcacctcaagtcccgtcccag | |
| gtgcagagtcccatgacctcgcggctgaatgctggaaaaggagatgggaagatgcctcct | |
| ccagaaagagccgccaacatccctcgaagcatctccagtgacgggcgcccactagagagg | |
| cggctgtctcctggttcggacatctatgtgacggtctcatccatggctttagcaagatcc | |
| cagtgtcggaactctcctagcaacttgtcttcatccagtgatactggttctgtggggggc | |
| acttacaggcagaagtccatgcccgaagggtttggagtgagccgtagatccccagcctcc | |
| attgacaggcagaacacccagtcagatattggtggcagcggaaaatccacgcctagctgg | |
| caaagaagtgaggatagcattgctgaccagatggcttacagttatagaggacctcaggat | |
| ttcaattcttttgtcctcgagcagcatgaatatacagagccaacatgccatctcccagca | |
| gtatcaaaggtactgccagctttccgagagagccccagtgggagattaatgcggcaggat | |
| ccagtggttcatttgtctccaaacaaacaagggcattctgatagccactactcgagccac | |
| tccagtagcaatactctctccagcaatgcgtcaagtgcccatagtgatgagaagtggtac | |
| gatggggaccgcacagaatccgaactcaacagctataactatctgcaaggcacctctgct | |
| gacagtggcattgacaccacctcttatggccccagccacggcagcacagcctcgctgggg | |
| gctgccacatcgtcacctcgctcagggccaggcaaggagaaagtggcacccctatggcac | |
| agctccagtgaagtaatctccatggcagatcggactttggagacagagagccacggcctg | |
| gaccggaaaacagagtcttccctgagcttagacatacacagcaagagccaagccggctcg | |
| acccctctgacaagggagaacagcaccttcagtataaacgatgctgcttcccacacaagt | |
| accatgagctcccgacactctgccagcccagtggttttcaccagtgcccggagttcacct | |
| aaagaagagcttcatccagctgccccctcacagctcgcaccatccttctcctcctcttcc | |
| tcctcctcctctggtcctaggagtttttaccctcgccagggcgctactagcaagtacctg | |
| attggatggaaaaaacccgaaggaaccataaactccgtgggatttatggacacgagaaag | |
| cgtcatcagagcgatggcaatgaaatagcccacaccaggctgcgtgcctcaaccagagac | |
| ctccgggcatctcctaagccaacctccaagtccaccattgaagaagatctaaagaaacta | |
| attgatcttgaaagcccaactcctgaatcacagaagagttttaagttccacgcactctcc | |
| tctcctcagtctcctttccccagcacccccacctcacggcgggccttgcacagaacactg | |
| tcggacgagagcatttacaatagccagagggagcactttttcacctccagggcgtcactt | |
| ctggaccaagccctgcccaacgacgtcctcttcagtagcacgtacccttctctccccaag | |
| tcgctcccgttgaggaggccttcttacaccttaggaatgaaatcgctgcatggagagttc | |
| tcagcctcggacagctccctcactgacatccaggagacccgcaggcagcctatgcccgac | |
| cctggcctgatgcccctgcctgacactgctgcagacttggattggtccaacctggtagat | |
| gctgccaaagcctatgaggtccagagagcctcattttttgctgctagtgatgaaaaccat | |
| cgccccttgagtgctgcatccaacagtgatcagctggaggaccaggctctggcccagatg | |
| aagccttacagcagcagtaaagactcctctcccactctggcttctaaagtggaccagctg | |
| gaaggtatgctgaagatgcttcgggaagatttgaagaaggaaaaagaagacaaagctcac | |
| cttcaggcggaggtgcagcacctgcgagaggacaacctgaggctacaggaggagtcccag | |
| aacgcctcggacaagctgaagaagttcacagaatgggtcttcaacaccatagacatgagc | |
| tagggaaggctgaggaggacaggagaagggcccagacactccctccagtgagtgtcctgc | |
| agcccttattccctccatagaaagcatcctcagagcaccttccctggcttcctactctgc | |
| cccctttcggggagtgcacaacacaatagttgcagatcaacaatcatcacctgccttttg | |
| tagaaaagaaaaacaaaaaaagtaaataaaaattttaaacagtaaaataaaagtttaact | |
| gctaaaaaaaaaaaaaaaaaaaaaaaaa | |

[0268] TABLE 147

| | |
|---|---|
| cbe_3340492 TRIP | |
| TRAF interacting protein | |
| length = 2007 | |
| gtgcggtggagcgaaatttgaagcaagcggaggcggggcgctctacgaagccggacctgt | SEQ ID NO: 138 |
| agcagtttctttggctgcctgggccccttgagtccagccatcatgcctatccgtgctctg | |
| tgcactatctgctccgacttcttcgatcactcccgcgacgtggccgccatccactgcggc | |
| cacaccttccacttgcagtgcctaattcagtcctttgagacagcaccaagtcggacctgc | |
| ccacagtgccgaatccaggttggcaaaagaaccattatcaataagctcttctttgatctt | |
| gcccaggaggaggagaatgtcttggatcgagaattcttaaagaatgaactggacaatgtc | |
| agagcccagctttcccagaaagacaaggagaaacgagacagccaggtcatcatcgacact | |
| ctgcgggatacgctggaagaacgcaatgctactgtggtatctctgcagcaggccttgggc | |
| aaggccgagatgctgtgctccacactgaaaaagcagatgaagtacttagagcagcagcag | |
| gatgagaccaaacaagcacaagaggaggcgggccggctcaggagcaagatgaagaccatg | |
| gagcagattgagcttctactccagagccagctccctgaggtggaggagatgatccgagac | |
| atgggtgtgggacagtcagcggtggaacagctggctgtgtactgtgtgtctctcaagaaa | |
| gagtacgagaatctaaaagaggcacggaaggcctcaggggaggtggctgacaagctgagg | |
| aaggatttgttttcctccagaagcaagttgcagacagtctactctgaattggatcaggcc | |
| aagttagaactgaagtcagcccagaaggacttacagagtgctgacaaggaaatcatgagc | |
| ctgaaaaagaagctaacgatgctgcaggaaaccttgaacctgccaccagtggccagtgag | |
| actgtcgaccgcctggttttagagagcccagcccctgtggaggtgaatctgaagctccgc | |
| cggccatccttccgtgatgatattgatctcaatgctacctttgatgtggatactccccca | |
| gcccggccctccagctcccagcatggttactacgaaaaactttgcctagagaagtcacac | |
| tccccaattcaggatgtccccaagaagatatgcaaaggccccaggaaggagtcccagctc | |
| tcactgggtggccagagctgtgcaggagagccagatgaggaactggttggtgccttccct | |
| atttttgtccggaatgccatcctaggccagaaacagcccaaaaggcccaggtcagagtcc | |
| tcttgcagcaaagatgtggtaaggacaggcttcgatgggctcggtggccggacaaaattc | |
| atccagcctactgacacagtcatgatccgcccattgcctgttaagcccaagaccaaggtt | |
| aagcagagggtgagggtgaagaccgtgccttctctcttccaggccaagctggacaccttc | |
| ctgtggtcgtgagaacagtgagtctgaccaatggccagacacatgcctgcaacttgtagg | |
| tcaaggactgtccaggcagggtttgtggacagagccctactttcgggaccagcctgaggt | |
| gtaagggcagacaaacaggtgagggtgagtgtgacacccagagactgctcttcctgccct | |
| caccctgccccactcctacgactgggagctgacatgaccagcccactgatcctgtcagca | |
| ggtcctgctctgttgccaggctcttgtttatagccatgatcagatgtggtcagactcttt | |
| ctgggcctggagaccacggtcacttgttgactgtctctgtggaccagagtgcttgaggca | |
| tctcaggcagcctcagcccaagcttctacctgcctttgacttgcttctagcatagcctgg | |
| gccaagcagggtggggaatggaggatagacatgggatgtatggagaggatggaagatttt | |
| cccgaaaaaaaaaaaaaaaaaaaaaaa | |

[0269] TABLE 148

| | |
|---|---|
| che_3345510 COX6C | |
| cytochrome c oxidase subunit VIc | |
| length = 444 | |
| ctttagtcaggaaggacgttggtgttgaggttagcatacgtatcaaggacagtaactacc | SEQ ID NO: 139 |
| atggctcccgaagttttgccaaaacctcggatgcgtggccttctggccaggcgtctgcga | |
| aatcatatggctgtagcattcgtgctatccctgggggttgcagctttgtataagtttcgt | |
| gtggctgatcaaagaaagaaggcatacgcagatttctacagaaactacgatgtcatgaaa | |
| gattttgaggagatgaggaaggctggtatctttcagagtgtaaagtaatcttggaatata | |
| aagaatttcttcaggttgaattacctagaagtttgtcactgacttgtgttcctgaactat | |
| gacacatgaatatgtgggctaagaaatagttcctcttgataaataaacaattaacaaata | |
| ctttgaaaaaaaaaaaaaaaaaaa | |

[0270] TABLE 149

| | |
|---|---|
| che_3454406 gbh_af252829 | |
| Homo sapiens chromosome 8 clone BAC 495D4 map 8g24, *** SEQUENCING | |
| length = 488 | |
| ccgagcagcctaactgggaggcaccccccagcagaggcacactgacacctcacacggcag | SEQ ID NO: 140 |
| ggtattccaacagacctgcagctgagggtcctgtctgttagaaggaaaactaacaaccag | |
| aaaggacatctacaccgaaaacccatctgtacatcaccatcatcaaagaccaaaagtaga | |
| taaaaccacaaagatggggaaaaaacagaacagaaaaactggaaactctaaaacgcagag | |
| cgcctctcctcctccaaaggaacgcagttcctcaccagcaatggaacaaagctggatgga | |
| gaatgattttgacgagctgagagaagaaggcttcagacgatcaaattactctgagctacg | |
| ggaggacattcaaaccaaaggcaaagaagttggaaactttgaaaaaaatttagaagaatg | |
| tataactagaataaccaatacagagaagtgcttaaaggagctgatggagctgaaaaccaa | |
| ggctcgag | |

[0271] TABLE 150

| | |
|---|---|
| cbe_3461331 MET | |
| met proto-oncogene (hepatocyte growth factor receptor) | |
| length = 4620 | |
| cgccctcgccgcccgcggcgccccgagcgctttgtgagcagatgcggagccgagtggagg | SEQ ID NO: 141 |
| gcgcgagccagatgcggggcgacagctgacttgctgagaggaggcggggaggcgcggagc | |
| gcgcgtgtggtccttgcgccgctgacttctccactggttcctgggcaccgaaagataaac | |
| ctctcataatgaaggcccccgctgtgcttgcacctggcatcctcgtgctcctgtttacct | |
| tggtgcagaggagcaatggggagtgtaaagaggcactagcaaagtccgagatgaatgtga | |
| atatgaagtatcagcttcccaacttcaccgcggaaacacccatccagaatgtcattctac | |
| atgagcatcacattttccttggtgccactaactacatttatgttttaaatgaggaagacc | |
| ttcagaaggttgctgagtacaagactgggcctgtgctggaacacccagattgtttcccat | |
| gtcaggactgcagcagcaaagccaatttatcaggaggtgtttggaaagataacatcaaca | |
| tggctctagttgtcgacacctactatgatgatcaactcattagctgtggcagcgtcaaca | |
| gagggacctgccagcgacatgtctttccccacaatcatactgctgacatacagtcggagg | |
| ttcactgcatattctccccacagatagaagagcccagccagtgtcctgactgtgtggtga | |
| gcgccctgggagccaaagtcctttcatctgtaaaggaccggttcatcaacttctttgtag | |
| gcaataccataaattcttcttatttcccagatcatccattgcattcgatatcagtgagaa | |
| ggctaaaggaaacgaaagatggttttatgtttttgacggaccagtcctacattgatgttt | |
| tacctgagttcagagattcttaccccattaagtatgtccatgcctttgaaagcaacaatt | |
| ttatttacttcttgacggtccaaagggaaactctagatgctcagacttttcacacaagaa | |
| taatcaggttctgttccataaactctggattgcattcctacatggaaatgcctctggagt | |
| gtattctcacagaaaagagaaaaaagagatccacaaagaaggaagtgtttaatatacttc | |
| aggctgcgtatgtcagcaagcctggggcccagcttgctagacaaataggagccagcctga | |
| atgatgacattcttttcggggtgttcgcacaaagcaagccagattctgccgaaccaatgg | |
| atcgatctgccatgtgtgcattccctatcaaatatgtcaacgacttcttcaacaagatcg | |
| tcaacaaaaacaatgtgagatgtctccagcatttttacggacccaatcatgagcactgct | |
| ttaataggacacttctgagaaattcatcaggctgtgaagcgcgccgtgatgaatatcgaa | |
| cagagtttaccacagctttgcagcgcgttgacttattcatgggtcaattcagcgaagtcc | |
| tcttaacatctatatccaccttcattaaaggagacctcaccatagctaatcttgggacat | |
| cagagggtcgcttcatgcaggttgtggtttctcgatcaggaccatcaacccctcatgtga | |
| attttctcctggactcccatccagtgtctccagaagtgattgtggagcatacattaaacc | |
| aaaatggctacacactggttatcactgggaagaagatcacgaagatcccattgaatggct | |
| tgggctgcagacatttccagtcctgcagtcaatgcctctctgccccaccctttgttcagt | |
| gtggctggtgccacgacaaatgtgtgcgatcggaggaatgcctgagcgggacatggactc | |
| aacagatctgtctgcctgcaatctacaaggttttcccaaatagtgcaccccttgaaggag | |
| ggacaaggctgaccatatgtggctgggactttggatttcggaggaataataaatttgatt | |
| taaagaaaactagagttctccttggaaatgagagctgcaccttgactttaagtgagagca | |
| cgatgaatacattgaaatgcacagttggtcctgccatgaataagcatttcaatatgtcca | |
| taattatttcaaatggccacgggacaacacaatacagtacattctcctatgtggatcctg | |
| taataacaagtatttcgccgaaatacggtcctatggctggtggcactttacttactttaa | |
| ctggaaattacctaaacagtgggaattctagacacatttcaattggtggaaaaacatgta | |
| ctttaaaaagtgtgtcaaacagtattcttgaatgttataccccagcccaaaccatttcaa | |
| ctgagtttgctgttaaattgaaaattgacttagccaaccgagagacaagcatcttcagtt | |
| accgtgaagatcccattgtctatgaaattcatccaaccaaatcttttattagtacttggt | |
| ggaaagaacctctcaacattgtcagttttctattttgctttgccagtggtgggagcacaa | |
| taacaggtgttgggaaaaacctgaattcagttagtgtcccgagaatggtcataaatgtgc | |
| atgaagcaggaaggaactttacagtggcatgtcaacatcgctctaattcagagataatct | |
| gttgtaccactccttccctgcaacagctgaatctgcaactccccctgaaaaccaaagcct | |
| ttttcatgttagatgggatcctttccaaatactttgatctcatttatgtacataatcctg | |
| tgtttaagccttttgaaaagccagtgatgatctcaatgggcaatgaaaatgtactggaaa | |
| ttaagggaaatgatattgaccctgaagcagttaaaggtgaagtgttaaaagttggaaata | |
| agagctgtgagaatatacacttacattctgaagccgttttatgcacggtccccaatgacc | |
| tgctgaaattgaacagcgagctaaatatagagtggaagcaagcaatttcttcaaccgtcc | |
| ttggaaaagtaatagttcaaccagatcagaatttcacaggattgattgctggtgttgtct | |
| caatatcaacagcactgttattactacttgggtttttcctgtggctgaaaaagagaaagc | |
| aaattaaagatctgggcagtgaattagttcgctacgatgcaagagtacacactcctcatt | |
| tggataggcttgtaagtgcccgaagtgtaagcccaactacagaaatggtttcaaatgaat | |
| ctgtagactaccgagctacttttccagaagatcagtttcctaattcatctcagaacggtt | |
| catgccgacaagtgcagtatcctctgacagacatgtcccccatcctaactagtggggact | |
| ctgatatatccagtccattactgcaaaatactgtccacattgacctcagtgctctaaatc | |
| cagagctggtccaggcagtgcagcatgtagtgattgggcccagtagcctgattgtgcatt | |
| tcaatgaagtcataggaagagggcattttggttgtgtatatcatgggactttgttggaca | |
| atgatggcaagaaaattcactgtgctgtgaaatccttgaacagaatcactgacataggag | |
| aagtttcccaatttctgaccgagggaatcatcatgaaagattttagtcatcccaatgtcc | |
| tctcgctcctgggaatctgcctgcgaagtgaagggtctccgctggtggtcctaccataca | |
| tgaaacatggagatcttcgaaatttcattcgaaatgagactcataatccaactgtaaaag | |
| atcttattggctttggtcttcaagtagccaaagcgatgaaatatcttgcaagcaaaaagt | |
| ttgtccacagagacttggctgcaagaaactgtatgctggatgaaaaattcacagtcaagg | |
| ttgctgattttggtcttgccagagacatgtatgataaagaatactatagtgtacacaaca | |
| aaacaggtgcaaagctgccagtgaagtggatggctttggaaagtctgcaaactcaaaagt | |
| ttaccaccaagtcagatgtgtggtcctttggcgtcgtcctctgggagctgatgacaagag | |
| gagccccaccttatcctgacgtaaacacctttgatataactgtttacttgttgcaaggga | |
| gaagactcctacaacccgaatactgcccagaccccttatatgaagtaatgctaaaatgct | |
| ggcaccctaaagccgaaatgcgcccatccttttctgaactggtgtcccggatatcagcga | |
| tcttctctactttcattggggagcactatgtccatgtgaacgctacttatgtgaacgtaa | |
| aatgtgtcgctccgtatccttctctgttgtcatcagaagataacgctgatgatgaggtgg | |
| acacacgaccagcctccttctgggagacatcatagtgctagtactatgtcaaagcaacag | |
| tccacactttgtccaatggttttttcactgcctgacctttaaaaggccatcgatattctt | |
| tgctccttgccataggacttgtattgttatttaaattactggattctaaggaatttctta | |
| tctgacagagcatcagaaccagaggcttggtcccacaggccagggaccaatgcgctgcag | |

[0272] TABLE 151

| | |
|---|---|
| cbe_3473488 gbh_al121903 | |
| Human DNA sequence from clone RP1-155G6 on chromosome 20 Contains | |
| length = 5694 | |
| aagaaaattgcaatgaaagaaacaaaagagctaacgattgcaaccaaatctactaagcag | SEQ ID NO: 142 |
| aatgtagctagtgaaaagcagcggcggctgctgtacaacttagagatggagcaaatggct | |
| aaaacagccaaagctctgatggaggctgtgagccatgccaaagccccgtttaccagtgcc | |
| actcacctggaccatgtccggccaatgttcaaactggtgtggacgccactattggcagcc | |
| tacagcatcggactccagaactgtgatgacactgaagtggcctccttgtgtttggaaggc | |
| atccgatgtgcaatccgaatcgcctgcatctttggaatgcagctggaacgagatgcctat | |
| gttcaggctcttgctcgcttctccctactcacagccagctccagcatcacagaaatgaag | |
| cagaaaaacatcgacaccattaagacgcttatcacagtggctcacaccgatggcaactac | |
| cttgggaattcctggcatgagatcttgaaatgcatcagccagctggagctcgctcagctg | |
| ataggaaccggtgtgaagacgcgctacctgtctggatctgggcgtgaaagagaagggagc | |
| ctgaagggccacacattggcaggagaagagttcatgggccttggcctcggtaatttggtg | |
| agtggcggagtggataaaagacagatggccagcttccaagaatcggttggtgagaccagc | |
| tcgcagagtgtggttgtagctgtggacaggatttttactgggtctaccagactggatgga | |
| aatgcaatagttgactttgtccgctggctgtgtgctgtgtccatggatgaactggcttcc | |
| ccccaccatcctcgcatgttcagcttgcagaagattgtggagatatcatactacaacatg | |
| aatcggatccgactacagtggtctcgaatatggcatgtgattggagatcacttcaataag | |
| gttggctgcaaccctaatgaagatgtggctatctttgctgttgactcattaaggcaactc | |
| tccatgaagtttcttgagaagggtgaattagccaacttccgtttccagaaagattttctg | |
| aggccctttgagcatattatgaagaaaaacaggtctcccaccatccgggacatggcgatc | |
| cgctgcattgcccagatggtgaactcccaggcggccaacatccgctcaggctggaagaac | |
| atctttgccgtgttccaccaggcagcctctgatcatgatgggaacattgtggagctggcc | |
| ttccagaccacttgccacattgtcacaactattttccagcaccattttcctgcagccatc | |
| gattcctttcaggatgctgtgaagtgcttatcagagttcgcctgcaacgccgctttccct | |
| gacacgagcatggaagcgattcggctcatccgcttctgtggcaaatacgtctctgagagg | |
| cctcgggtgctacaagaatacacaagtgatgacatgaatgtagctcctggtgacagagtc | |
| tgggtccgaggctggttccccatcttattcgaactctcctgcatcattaatagatgcaag | |
| ttagatgtacgaacaaggggactcacagtcatgtttgagatcatgaagagctatggccac | |
| acctttgagaagcactggtggcaggacctgttcagaatcgtgtttcggatttttgacaat | |
| atgaaactccctgagcaactgtcagagaaatctgagtggatgacaacaacctgcaatcac | |
| gcactttatgctatttgtgatgtttttacccagttttatgaagctttgaatgaagttctt | |
| ctttctgatgtatttgcacaattgcagtggtgtgtcaaacaagataatgaacagttggcg | |
| cgatcaggtacaaattgcttagaaaacttagtaatatccaatggagagaaattcagtcct | |
| gaagtctgggatgaaacctgcaactgtatgttggatattttcaaaacaaccatcccacat | |
| gttttgctgacatggagacctgtaggaatggaggaagattcatcagaaaagcatttggat | |
| gtggatctggaccgccagtctttaagcagcatagataaaaatccctctgagaggggacag | |
| agccagctctctaacccaacagatgacagctggaagggtagaccatacgcaaatcagaaa | |
| ctgtttgccagcctcctcatcaagtgtgtggtccagttggaattgatacagaccattgac | |
| aacattgtgttctaccctgcgacgagcaaaaaggaggatgcagagcacatggttgccgcc | |
| cagcaagacacgctggatgcagatatccacatagagacggaggatcagggcatgtataag | |
| tacatgtcttcccagcacctcttcaagctgttggactgtttgcaggaatcccattcattc | |
| tcaaaggccttcaactccaattacgagcagcggactgtcctgtggcgagcaggttttaag | |
| ggcaagtctaaacccaatcttctaaaacaagaaaccagcagcctggcctgttgtttgagg | |
| atcctgtttcgaatgtatgttgatgagaaccgcagggattcctgggaagaaatacagcag | |
| agacttttaactgtttgcagtgaagctcttgcctatttcatcactgtgaattctgagagc | |
| catcgggaggcctggacaagtctcttgttgttacttctaactaaaaccctcaaaataaat | |
| gatgaaaagttcaaagcacatgcttcaatgtactacccctacttgtgtgaaattatgcag | |
| tttgacctgatccctgagctccgagcagttctgcggaagttcttcctacggataggtgtt | |
| gtgtataagatatggataccagaagagccatcacaggtaccagcagcactgtcaccagtg | |
| tggtagccctggctgcccaggccagtgctgcagctctgcagaatgttcagcatgccattt | |
| ctgactggcacatctcgtgaagtttcatagaaacaaggagttggcatcttggatctcaga | |
| atggcctggaaacggatggcctctacgctgttccatcacagtctccaactaaggcttatg | |
| gtatttcattaaactgttgcatacccagttagcacagtaggtggggagtctgcttcattt | |
| ctatcattccatttttctgattaaactgtcaaatctgtcattgcatatgccatcgttttc | |
| tagcaaaatcccatgattggctataaacgttttgtaagaagtcactctccttgaaaatac | |
| tgaacatagctgtataggtttgtgattattagagaatatgttaataaaacttcttgtaac | |
| ggctaactgccacctaaaatatgctgggttttctgttgtttgagtgtgttagagaaattt | |
| gaatgtttttgtcagttacgagtcagccgtaattagattagtttaaggacaggtcaggat | |
| tagagaagagttgtttttgtgttttgttaatgtctgagtgatttttaaagtattttacaa | |
| aaagatattgaaaatttggttgaaggcagagtttagtaattaagttagaattaagagttt | |
| tgcgaggttaaaaaaatgtgcctcgtggatctccctgttttagtaacatggagagaaaaa | |
| gtctacacgaaaaagtgaacaatttaatgaagatgattagccttccttgaaataagtatt | |
| tgtggatgggtgttaaattaaaatttccagaatacactgtccatctcacacactgtgaaa | |
| tctaatatatgaagtagtaatgaaaatgaagtagtaatttaaccagagttcatttatcct | |
| tgaataaacctttttattttcacctcagaaaagtgagtgtactggcagttagtgtcactg | |
| ctttgcacagtccccattaaaggaccctccagagagggacagtaactgtgcatgagaagc | |
| cgctcccataagcctcctcagccagatgtcatgggtggaactggagctgtgtcggggcca | |
| gcacagctgaactgtgacaatggcaggaggtggcatgtgcccagcacttccattaatctg | |
| agcctaggagttgaattctttggcaaggttggattctgaggtccttattatgttaatgat | |
| ggtgcaatactctcacctgcagtagaactgagttctgctgcagcttgtgtaaaagtgggc | |
| agtacacaagtacgtcccaaagcctgtgagcagtatacgtggatgctcacccatgagaag | |
| gagcacacacgcctcattctctgccctcacccactgctcacctagagcatcgctgagcgt | |
| tagacaaagtgttacacagaatgattaaaactttcagacttctacctatgctctttagtc | |
| ctgtaaattgggttgtattgatgtcaactctggtgccttagaagttagtagtttgggaac | |
| ctatctgtaaaatcagatgttttttctttgtagagaaggatttctggtgcttttgcttac | |
| taagagaccgatattcttaagttgttttcttgttttaacagccttgagaaatgtttggtt | |
| ttggccagcagaattcttgtctacttttttctttcccaaaaagtgttttttaatttctct | |
| accaaagaaaaaatgagcaggtttaggtttttacatgacttatatacattagataaaagg | |
| agctgtataatttagcaggaaaggactagggagaatactttactgtgagtggaaaatgtt | |
| agcacatttgactggtttgccctggaatccactgcacctttacactgcaccatgaaacct | |
| acactccctggtatcatagcgcgtcatcacctcaacaagtcagtcgtctccattgatatt | |
| tgtacaaaaggtatacatggggaacacgtgttcattcattaagtccatcttgcgtgcagc | |
| tatatccctgattggttatttttcctttccttctgaggttctcatgtcattttcttcatc | |
| ggatgtgactaaaatttttctggtgtcttctgccctctctttaattttgcctcttgaggg | |
| gtagcagatgtgtcagtgcattttattacttgctgaaacattcaggcttacatttcttat | |
| tagtttagtattttaaaagatttaattttctgaatgaggcatttgaattgtaccagcaat | |
| ggacttttaaaaaattggatgtaaaaccattcagggtgatttttcttgtcagtggacagt | |
| gacgaacagagatttgaaatcccttacctccaataataagccattcagcctaaattcatt | |
| tttatgaataaatctcttctttctcatggtaaatgtggcttgtgccactcaaacactagt | |
| gaaagggtatgtacaaccgcaacatcaggccaggacaccatttatttaaccaagtaatgg | |
| aggagagtgaaacattttccaaggccttatttctttttcagaatgctttaagtgttgatt | |
| atgtgtgctgggtctctagagaagtttttatttgttacaatactgctgctttgagcaatt | |
| ttgtttctcttcattgtctgttaggggaatcaccagctttggcatcttaacaacaaacag | |
| tggatgggtaatttttatttctgatacgcatctttagagtcaaatatatcttttccctgt | |
| actcctcatgtacaaccaaagaacatacattatgaaaattgtattataatatctggaaac | |
| acaacattttcctctggcagttacttttgtacgaaatgaaaaaaaaaaaaaaaa | |

[0273] TABLE 152

| | |
|---|---|
| cbe_3474077 KRT4 | |
| keratin 4 | |
| length = 2617 | |
| gacttgctccggtttgcagagctaggaggtggcaggctgtgcgctcaaactcaggctgtc | SEQ ID NO: 143 |
| taactccacattctgtggggtgagaggatgggtgatggggtgtcttttctggaggaggga | |
| ggtgctgtgagcctagcgagatggaggtacagtgggtgtgggcctggagcgctgggccca | |
| ggcaggggcttctgattaggaagccctggggcaccagttcaggttctcccagagagtagt | |
| gtgatgggatccagtaacctgtgccctccagatgacttctgtaggtgtgtttagtgacat | |
| gctcaacgggtgcgggaaggatgggcttgtgccaagggccaagcccagagatgtttcaga | |
| tttttccctttatgcccctgcaaccaagccctgctgctccaggacatataagagacgaag | |
| gctgagggctccagcactcaccggcctgggccctgtcacttctctgatagctcccagctc | |
| gctctctgcagccatgattgccagacagcagtgtgtccgaggcgggccccggggcttcag | |
| ctgtggctcggccattgtaggcggtggcaagagaggtgccttcagctcagtctccatgtc | |
| tggaggtgctggccgatgctcttctgggggatttggcagcagaagcctctacaacctcag | |
| ggggaacaaaagcatctccatgagtgtggctgggtcacgacaaggtgcctgctttggggg | |
| tgctggaggctttggcactggtggctttggtgccggcggcttcggagctggtttcggcac | |
| tggtggctttggtggtggatttgggggctccttcagtggtaagggtggccctggcttccc | |
| cgtctgccccgctgggggaattcaggaggtcaccatcaaccagagcttgctcacccccct | |
| ccacgtggagattgaccctgagatccagaaagtccggacggaagagcgcgaacagatcaa | |
| gctcctcaacaacaagtttgcctccttcatcgacaaggtgcagttcttagagcaacagaa | |
| taaggtcctggagaccaaatggaacctgctccagcagcagacgaccaccacctccagcaa | |
| aaaccttgagcccctctttgagacctacctcagtgtcctgaggaagcagctagatacctt | |
| gggcaatgacaaagggcgcctgcagtctgagctgaagaccatgcaggacagcgtggagga | |
| cttcaagactaagtatgaagaggagatcaacaaacgcacagcagccgagaatgactttgt | |
| ggtcctaaagaaggacgtggatgctgcctacctgaacaaggtggagttggaggccaaggt | |
| ggacagtcttaatgacgagatcaacttcctgaaggtcctctatgatgcggagctgtccca | |
| gatgcagacccatgtcagcgacacgtccgtggtcctttccatggacaacaaccgcaacct | |
| ggacctggacagcattattgccgaggtccgtgcccagtacgaggagattgcccagaggag | |
| caaggctgaggctgaagccctgtaccagaccaaggtccagcagctccagatctcggttga | |
| ccaacatggtgacaacctgaagaacaccaagagtgaaattgcagagctcaacaggatgat | |
| ccagaggctgcgggcagagatcgagaacatcaagaagcagtgccagactcttcaggtatc | |
| cgtggctgatgcagagcagcgaggtgagaatgcccttaaagatgcccacagcaagcgcgt | |
| agagctggaggctgccctgcagcaggccaaggaggagctggcacgaatgctgcgtgagta | |
| ccaggagctcatgagtgtgaagctggccttggacatcgagatcgccacctaccgcaaact | |
| gctggagggcgaggagtacagaatgtctggagaatgccagagtgccgtgagcatctctgt | |
| ggtcagcggtagcaccagcactggaggcatcagcggaggattaggaagtggctccgggtt | |
| tggcctgagtagtggctttggctccggctctggaagtggctttgggtttggtggcagtgt | |
| ctctggcagttccagcagcaagatcatctctaccaccaccctgaacaagagacgatagag | |
| gagacgaggtccctgcagctcactgtgtccagctgggcccagcactggtgtctctgtgct | |
| tccttcacttcacctccatcctctgtctctggggctcatcttactagtatcccctccact | |
| atcccatgggctctctctgccccaggatgatcttctgtgctgggacagggactctgcctc | |
| ttggagtttggtagctacttcttgatttgggcctggtgacccacctggaatgggaaggat | |
| gtcagctgacctctcacctcccatgggcagagaagaaaatgaccaggagtgtcatctcca | |
| gaattattggggtcacatatgtcccttcccagtccaatgccatctcccactagatcctgt | |
| attatccatctacatcagaaccaaactacttctccaacacccggcagcacttggccctgc | |
| aagcttaggatgagaaccacttagtgtcccattctactcctctcattccctcttatccat | |
| ctgcaggtgaatcttcaataaaatgcttttgtcattc | |

[0274] TABLE 153

| | |
|---|---|
| cbe_3563252 LOC91689 | |
| hypothetical gene supported by AL449243 | |
| length = 1586 | |
| agcgggctttcttcccgagggcggcacgagggctgggcggtggggtgcgggtgcccgggt | SEQ ID NO: 144 |
| gaggggcggagctgggggcatggcgtccggagcggctcgctggctagtattggcacccgt | |
| caggtccggggctctccggagcgggcctagcttgaggaaagatggcgatgtctccgccgc | |
| atggagcggctcaggccggagcctggtaccgtcggggtcagtcatcgttacccgcagcgg | |
| cgccattttgcccaaaccggtgaaaatgtccttcggccttctgcgtgtgttctccattgt | |
| gatcccctttctctatgtcgggacactcattagcaagaactttgctgctctacttgagga | |
| acatgacatttttgttccagaggatgatgatgatgatgactaacaggaattacagaaagg | |
| agaaagcactaactgaagaaatggtgatgctctcagtttctctgccttccctatcagcag | |
| aaaggctcggggaaggccctcagcctcccagtctggtgaagcttcctgtatggtccatga | |
| ccgtattccaccccaggctctgggaggctccctgagatgtgctgtccactaagcactgca | |
| caaacaagcaatcaaattatgaataaacataataaatatcagccgtgcgtgactgagtga | |
| tggctgcagtttctcagtatccctaggttctagttggtgcagttgtctctgctgtccttt | |
| atttatgggagaaacataggcccaggctatccaggctgcagtggagcctggtgaactatt | |
| ctgggggccctgggaactattttcattgtttacaaaagcccaacagaaactgtgcatttt | |
| cccttaagaaagcttcatgggctaactaaagcctcatgccattctgtgttcagtgccagt | |
| catgacagctctgcttgttagcatactacttaaatataactagaatgattcaaaactcgg | |
| gttctgtgatatgaggatatagataggttttcatctatttcctggcttataactcccaaa | |
| acccttgttttaggcttttgttataatgttgggcacttcgggcctcagaaaacagcaggc | |
| tgtttctcagatcttctcctgacctcctttcacctgctgctttttctccccaaggcaggc | |
| catagaaactaaaagtataatcttcctttgcccatcttccagttggccataaaaagaatc | |
| ctctgacctaccttgtctgattttaggtcatgagacccccatttcagaagggattctgcc | |
| ccatacctgagaggaagaaatgtagacaggccttgttggacttccccactccatctgtat | |
| tagattatgcctcttttgtccaatcccatttctccagtgttgtccatgcttcaatcatcc | |
| ctatccaatgaggtctccataaaaggcccaagaagacaggtttagagagctttcggagaa | |
| cagaacacttggctttgcaaagtggcacgcctggagagaacttggaagctccacgcccct | |
| tctatacctcaccctatgcatctcttcagctgtatcttttgtgatatcctttataataaa | |
| ccagtaaacggaaaaaaaaaaaaaaa | |

[0275] TABLE 154

| | |
|---|---|
| cbe_3575702 SUI1 | |
| putative translation initiation factor | |
| length = 1324 | |
| cggcacgagcgccgccgaggattcagcagcctcccccttgagccccctcgcttcccgacg | SEQ ID NO: 145 |
| ttccgttcccccctgcccgccttctcccgccaccgccgccgccgccttccgcaggccgtt | |
| tccaccgaggaaaaggaatcgtatcgtatgtccgctatccagaacctccactctttcgac | |
| ccctttgctgatgcaagtaagggtgatgacctgcttcctgctggcactgaggattatatc | |
| catataagaattcaacagagaaacggcaggaagacccttactactgtccaagggatcgct | |
| gatgattacgataaaaagaaactagtgaaggcgtttaagaaaaagtttgcctgcaatggt | |
| actgtaattgagcatccggaatatggagaagtaattcagctacagggtgaccaacgcaag | |
| aacatatgccagttcctcgtagagattggactggctaaggacgatcagctgaaggttcat | |
| gggttttaagtgcttgtggctcactgaagcttaagtgaggatttccttgcaatgagtaga | |
| atttcccttctctcccttgtcacaggtttaaaaacctcacagcttgtataatgtaaccat | |
| ttggggtccgcttttaacttggactagtgtaactccttcatgcaataaactgaaaagagc | |
| catgctgtctagtcttgaagtccctcatttaaacagaggtcaagcaataggcgcctggca | |
| gtgtcaagcctgaaaccaagcaataccgtcatgtttcagccaagcccagagccctaagat | |
| tacaaacaactatggccggaacctcctcagctctccctctgcagagttccctaccctaag | |
| agaatgttaccacctgaacagtcctcggtgaatctgagaggagaggatggggtaaggcag | |
| aagcaccagctgtactactagaagggagcttttggtggtagatcccctggtgtctccaac | |
| ctgactaggtggacagagctcaaagaggccctcttaccgctagcgaggtgataggacatc | |
| tggcttgccacaaaggtctgttcgaccagacatatcctagctaagggatgtccaaacatc | |
| agaatgtgaggccaaccttctatcagagttaaacttttgacaagggaacaaatctcaaac | |
| tgatccatcagtcatgtagctagctgtagagcttgcaacttaatagcagcagctgcccaa | |
| tgccatgtgaagtaacaaactggtttttggtttttttttccccttcagttttaatgttat | |
| gtgtaatgtatttaaacccttatttaaataaaacttgttttcagaaaaaaaaaaaaaaaa | |
| aaaa | |

[0276] TABLE 155

| | |
|---|---|
| cbe_3580897 HSPA5 | |
| heat shock 70 kDa protein 5 (glucose-regulated protein, 78 kDa) | |
| length = 3925 | |
| acagcacagacagattgacctattggggtgtttcgcgagtgtgagagggaagcgccgcgg | SEQ ID NO: 146 |
| cctgtatttctagacctgcccttcgcctggttcgtggcgccttgtgaccccgggcccctg | |
| ccgcctgcaagtcggaaattgcgctgtgctcctgtgctacggcctgtggctggactgcct | |
| gctgctgcccaactggctggcaagatgaagctctccctggtggccgcgatgctgctgctg | |
| ctcagcgcggcgcgggccgaggaggaggacaagaaggaggacgtgggcacggtggtcggc | |
| atcgacctggggaccacctactcctgcgtcggcgtgttcaagaacggccgcgtggagatc | |
| atcgccaacgatcagggcaaccgcatcacgccgtcctatgtcgccttcactcctgaaggg | |
| gaacgtctgattggcgatgccgccaagaaccagctcacctccaaccccgagaacacggtc | |
| tttgacgccaagcggctcatcggccgcacgtggaatgacccgtctgtgcagcaggacatc | |
| aagttcttgccgttcaaggtggttgaaaagaaaactaaaccatacattcaagttgatatt | |
| ggaggtgggcaaacaaagacatttgctcctgaagaaatttctgccatggttctcactaaa | |
| atgaaagaaaccgctgaggcttatttgggaaagaaggttacccatgcagttgttactgta | |
| ccagcctattttaatgatgcccaacgccaagcaaccaaagacgctggaactattgctggc | |
| ctaaatgttatgaggatcatcaacgagcctacggcagctgctattgcttatggcctggat | |
| aagagggagggggagaagaacatcctggtgtttgacctgggtggcggaaccttcgatgtg | |
| tctcttctcaccattgacaatggtgtcttcgaagttgtggccactaatggagatactcat | |
| ctgggtggagaagactttgaccagcgtgtcatggaacacttcatcaaactgtacaaaaag | |
| aagacgggcaaagatgtcaggaaagacaatagagctgtgcagaaactccggcgcgaggta | |
| gaaaaggccaaacgggccctgtcttctcagcatcaagcaagaattgaaattgagtccttc | |
| tatgaaggagaagacttttctgagaccctgactcgggccaaatttgaagagctcaacatg | |
| gatctgttccggtctactatgaagcccgtccagaaagtgttggaagattctgatttgaag | |
| aagtctgatattgatgaaattgttcttgttggtggctcgactcgaattccaaagattcag | |
| caactggttaaagagttcttcaatggcaaggaaccatcccgtggcataaacccagatgaa | |
| gctgtagcgtatggtgctgctgtccaggctggtgtgctctctggtgatcaagatacaggt | |
| gacctggtactgcttgatgtatgtccccttacacttggtattgaaactgtgggaggtgtc | |
| atgaccaaactgattccaaggaacacagtggtgcctaccaagaagtctcagatcttttct | |
| acagcttctgataatcaaccaactgttacaatcaaggtctatgaaggtgaaagacccctg | |
| acaaaagacaatcatcttctgggtacatttgatctgactggaattcctcctgctcctcgt | |
| ggggtcccacagattgaagtcacctttgagatagatgtgaatggtattcttcgagtgaca | |
| gctgaagacaagggtacagggaacaaaaataagatcacaatcaccaatgaccagaatcgc | |
| ctgacacctgaagaaatcgaaaggatggttaatgatgctgagaagtttgctgaggaagac | |
| aaaaagctcaaggagcgcattgatactagaaatgagttggaaagctatgcctattctcta | |
| aagaatcagattggagataaagaaaagctgggaggtaaactttcctctgaagataaggag | |
| accatggaaaaagctgtagaagaaaagattgaatggctggaaagccaccaagatgctgac | |
| attgaagacttcaaagctaagaagaaggaactggaagaaattgttcaaccaattatcagc | |
| aaactctatggaagtgcaggccctcccccaactggtgaagaggatacagcagaaaaagat | |
| gagttgtagacactgatctgctagtgctgtaatattgtaaatactggactcaggaacttt | |
| tgttaggaaaaaattgaaagaacttaagtctcgaatgtaattggaatcttcacctcagag | |
| tggagttgaaactgctatagcctaagcggctgtttactgcttttcattagcagttgctca | |
| catgtctttgggtgggggggagaagaagaattggccatcttaaaaagcaggtaaaaaacc | |
| tgggttagggtgtgtgttcaccttcaaaatgttctatttaacaactgggtcatgtgcatc | |
| tggtgtaggaagttttttctaccataagtgacaccaataaatgtttgttatttacactgg | |
| tctaatgtttgtgagaagcttctaattagatcaattacttattttaggaaatttaagact | |
| agatactcgtgtgtggggtgaggggagggagtatttggtatgttgggataaggaaacact | |
| tctatttaatgcttccagggattttttttttttttttttaaccctcctgggcccaagtga | |
| tccttccacctcagtctcccagctaattgagaccacaggcttgttaccaccatgctcggc | |
| ttttgcattaatctaagaaaaggggagagaagttaatccacatctttactcaggcaaggg | |
| gcatttcacagtgcccaagagtggggttttcttgaacatacttggtttcctatttcccct | |
| tatctttctaaaactgcctttctggtggctttttttaaaattattactaatgatgctttt | |
| atagctgcttggattctctgagaaatgatggggagtgagtgatcactggtattaacttta | |
| tacacttggatttcatttgtaactttaggatgtaaaggtatattgtgaaccctagctgtg | |
| tcagaatctccatccctgaaatttctcattagtggtactggggtgggatcttggatggtg | |
| acattgaaactacactaaatcccctcactatgaatgggttgttaaaggcaatggtttgtg | |
| tcaaaactggtttaggattacttagattgtgttcctgaagaaaagagtccaggtaaatgg | |
| tatgatcaataaaggacaggctggtgctaacataaaatccaatattgtaatcctagcact | |
| ttgggaggccaaggcgggtggatcacaaggtcaagagatagagaccatctttgccaacat | |
| ggtgaaactccatctctactgaaaatacaaaaattagctgggcgtggtagtgcaagctga | |
| aggctgaggcaggagaatcactcgaacccgggaggcagaggttgcagtgagccgagatca | |
| caccactgtactccagcccggcactccagcctggcgacaagagtgagactccacctcaaa | |
| aaaaaaaaaaagaatccaatactgcccaaggataggtattttatagatgggcaactggct | |
| gaaaggttaattctctagggctagtagaactggatcccaacaccaaactcttaattagac | |
| ctaggcctcagctgcactgcccgaaaagcatttgggcagaccctgagcagaatactggtc | |
| tcaggccaagcccaatacagccattaaagatgacctacagtgctgtgtaccctggggcaa | |
| tagggttaaatggtagttagcaactagggctagtcttcccttacctcaaaggctctcact | |
| accgtggaccacctagtctgtaactctttctgaggagctgttactgaatattaaaaagat | |
| agacttcaaaaaaaaaaaaaaaaaa | |

[0277] TABLE 156

| | |
|---|---|
| cbe_3583511 MGC3222 | |
| hypothetical protein MGC3222 | |
| length = 5765 | |
| gtggtgtctcccgacagcatccacagtgtggctccggagaatgaaggaaggctggtgcac | SEQ ID NO: 147 |
| atcattggcgccttacggacatccaagcttttgtctgatccaaactatggggtccatctt | |
| ccggctgtgaaactgcggaggcacgtggagatgtaccaatgggtagaaactgaggagtcc | |
| agggagtacaccgaggatgggcaggtgaagaaggagacgaggtattcctacaacactgaa | |
| tggaggtcagaaatcatcaacagcaaaaacttcgaccgagagattggccacaataacccc | |
| agtgccatggcagtggagtcattcacggcaacagccccctttgtccaaattggcaggttt | |
| ttcctctcgtcaggcctcatcgacaaagtcgacaacttcaagtccctgagcctatccaag | |
| ctggaggaccctcatgtggacatcattcgccgtggagactttttctaccacagcgaaaat | |
| cccaagtatccagaggtgggagacttgcgtgtctccttttcctatgctggactgagcggc | |
| gatgaccctgacctgggcccagctcacgtggtcactgtgattgcccggcagcggggtgac | |
| cagctagtcccattctccaccaagtctggggataccttactgctcctgcaccacggggac | |
| ttctcagcagaggtgagtgctgtgccctactcgtacggtggaggaacaagcatgtccttc | |
| cttccttccagtggttatttaataagatcacactaccaggggtcatagccagtgaatgag | |
| gcaagaagaagaaatagcggaatgttgagtatgcctcatcaaagtgtttgaccaggagtg | |
| tttcagattccagatttttttggatttgcaggtatttgtatatacataatgagatctctt | |
| ggggatgagaaccaagtctaaacacagaatctatttatgtttcatgtatactttgtacac | |
| atcgcctgaaggtgattttatacaatgcaacccgtcacatggggtcaagtgtgggatttc | |
| cactagtggcgtcatgttggcattcagaaagttttggattttggagcacttcagcatttg | |
| ggtttttggattgtggatgctgagtctgtcatgaaccctcagtgtgcaggactgtgctag | |
| gcactaaactcactgtgcctcacagactgtccggtagaggagtgagagtgacagaaactc | |
| gtaagtactgatgcatcgtgccgagtgttggaaagaggagaacaggtgctctgataccag | |
| tggacgtcagagtagaacatccgtttctgcagtgatcaagcagggcctctgacaagtgag | |
| ttttgctgacgagaaggggttaaccctagaagaatcagtgatcagtcagttccagcaaga | |
| acagcccagtctgggcacgaaagggttcaccttctaagggggcacccggagtgctgtggc | |
| cacagcccagagcggggagagggagtgggtgggggggctccaccaaagtctgtgtccttc | |
| cagaacattaggagggcggggaagggttttgggcctcagctacctgagtatccctctccc | |
| attgtaaatagggagggctatgcctaccccgggtcccaaggagaaggggtgccaagatgt | |
| gctgattagttcagttctgtgccttaaaagttagcctgtcttctctaggcaggcaatcct | |
| tctctgcagcagaagaattgagtctttagtttttctgttgttgatgaacacaggtatccc | |
| tggtggggcactctatacctgccctaaccaggactgctggggttttcattccagagtggc | |
| cagaaagggtcaaggcagcagacaggcatcaggggttagctgtgaccttttgttcctatt | |
| attagatcctcagcagccatctgtcccattagcctccagcttgtggtggtgcttgggcct | |
| caccaactcctggtacctggccagggctagggtgtggtcaggctgttgcccaggagccca | |
| gttaccaacctcagggtagggctgccacctcccagcctagaaggccatgagtcacccttc | |
| caccagcagctgagggtccccagcgagtttctaaaattaggaggcccagtccaggccttg | |
| ctctctctcccagggctgaggcccagctcacgcagccgcccctccagagaggagtggatg | |
| gggcccatggcttaggtaatgccccagaaaggaaggccctgcagtgcagatgctcaggcg | |
| gcctccttaccccctgggtctcctgctgcttagcagccccaaagccctgtcttcccccag | |
| cccagcccccacccccacacaaggtctggggtctctgccaagtagaaaaaaggcccagag | |
| ccaggcaggcagctcagggcaaaagtcaggatgccccgattccagtcccaggggcaggag | |
| agtacagctgcccaagcaggcacatcaaataaatggtgagtgataaatgtgacctgtttt | |
| tgttgttacggactctgagagagggcccgattcagatcagagggtcagggaaagccctct | |
| gaagaaatggggttcaagcaaagctcaaaagaatatgtaggaagctggccaggcatgact | |
| gcaggcaatcgctgtaggcagagcaaacccacgcgcagatacacaggcgagaggacactt | |
| gacctggactggggacagcagccagcagggtcagggcactggcagcagggtcggtgtccg | |
| gggggtgtggcagggctctggcaggtgactgtgtggagaacacagagtgggtgatagaag | |
| cagggccagtgaggctcctgcgggcagacagtggtaagagactcgggaatatgtggcctg | |
| gactggatggggtggtaggggaggagcgagccatgtctttcccatagatgtgagtgggtg | |
| ggtgggtgtgccatgtgctgagatggagaaggcgccagtgtcagcactagacaggctgag | |
| atgtcaagtggaaatgtcaaggaggtggtggaggtggtgggagctgcagggctgtgaggc | |
| ccgggagagggccagagctgcagctttaaattggagggtcacggcatgtggaggccaagg | |
| aagcagatgggatgtccggggagagagtatggactgaagcagctaaagaattgcagcatc | |
| taatggacaggaagaggggcagcgacagcgatggagcctgagaaggagggtgcagtgtcc | |
| ccaagccatgtggagaggttctgagattaaacagatcacacacatagcgcagagcatgct | |
| gcccagcagacatcctccaacctgctcaggggtggtgggcagggtcctgctcattccagg | |
| tgagaccgtgggctgagggctccaggtgctggcaggctctgagctgaggaaggcccgtac | |
| gttccacagagatctcatgccttgccctgtgctctgccagatgggcagaaggacttagcc | |
| ctataggaggcttgcccccgctccgtctggcctgttcagaaatggccaacagctcccgag | |
| ttggtacagccccctcaggacctgccctgccgactgggtacgccactggccctcagcatc | |
| ctgacctgcccccaccttgtcctgcaggaggtgtttcatagagaactaaggagcaactcc | |
| atgaagacctggggcctgcgggcagctggctggatggccatgttcatgggcctcaacctt | |
| atgacacggatcctctacaccttggtggactggtttcctgttttccgagacctggtcaac | |
| attggcctgaaagcctttgccttctgtgtggccacctcgctgaccctgctgaccgtggcg | |
| gctggctggctcttctaccgacccctgtgggccctcctcattgccggcctggcccttgtg | |
| cccatccttgttgctcggacacgggtgccagccaaaaagttggagtgaaaagaccctggc | |
| acccgcccgacacctgcgtgagccctaggatccaggtcctctctcacctctgacccagct | |
| ccatgccagagcaggagccccggtcaattttggactctgcaccccctctcctcttcaggg | |
| gccagacttggcagcatgtgcaccaggttggtgttcaccagctcatgtcttccccacatc | |
| tcttcttgccagtaagcagctttggtgggcagcagcagctcatgaatggcaagctgacag | |
| cttctcctgctgtttccttcctctcttggactgagtgggtacggccagccactcagccca | |
| ttggcagctgacaacgcagacacgctctacggaggcctgctgataaagggctcagccttg | |
| ccgtgtgctgcttctcatcactgcacacaagtgccatgctttgccaccaccaccaagcac | |
| atctgtgatcctgaagggcggccgttagtcattactgctgagtcctgggtcaccagcaga | |
| cacactgggcatggacccctcaaagcaggcacacccaaaacacaagtctgtggctagaac | |
| ctgatgtggtgtttaaaagagaagaaacactgaagatgtcctgaggagaaaagctggaca | |
| tatactgggcttcacacttatcttatggcttggcagaatctttgtagtgtgtgggatctc | |
| tgaaggccctatttaagtttttcttcgttactttgctgcttcatgtgtactttcctaccc | |
| caagaggaagttttctgaaataagatttaaaaacaaaacaaaaaaaacacttaatatttc | |
| agactgttacaggaaacaccctttagtctgtcagttgaattcagagcactgaaaggtgtt | |
| aaattggggtatgtggtttgattgataaaaagttacctctcagtattttgtgtcactgag | |
| aagctttacaatggatgcttttgaaacaagtatcagcaaaaggatttgttttcactctgg | |
| gaggagagggtggagaaagcacttgctttcatcctctggcatcggaaactcccctatgca | |
| cttgaagatggtttaaaagattaaagaaacgattaagagaaaaggttggaagctttatac | |
| taaatgggctccttcatggtgacgccccgtcaaccacaatcaagaactgaggcctgaggc | |
| tggttgtacaatgcccacgcctgcctggctgctttcacctgggagtgctttcgatgtggg | |
| cacctgggcttcctagggctgcttctgagtggttctttcacgtgttgtgtccatagcttt | |
| agtcttcctaaataagatccacccacacctaagtcacagaatttctaagttccccaacta | |
| ctctcacacccttttaaagataaagtatgttgtaaccaggatgtcttaaatgattctttg | |
| tgtaccttttctgtcatattcagaaaccgttttgtgcctgctgggagtaattcctttagc | |
| aattaagtatttggtagctgaataaggggtcagaacttctgaaaccagagatctgtaatc | |
| atctctattggcctggggtgcctgtgctataaatgagtttcttcacatgaaaaacacagc | |
| cagcccaagatgacttatctgggtttaggattcaatagtattcactaactgcttattaca | |
| tgagcaatttcatcaaatctccaaactcttaaaggatgctttcggaaaacacgctgtata | |
| cctagatgatgactaaatgcaaaatccttgggctttggtttttttctagtaaggatttta | |
| aataactgccgacttcaaaagtgttcttaaaacgaaagataatgttaagaaaaatttgaa | |
| agctttggaaaaccaaatttgtaatatcattgtattttttattaaaagttttgtaataaa | |
| tttct | |

[0278] TABLE 157

| | |
|---|---|
| cbe_3590661 NUP214 | |
| nucleoporin 214 kDa | |
| length = 6614 | |
| ctgcgcgccgctggcgctgaggggaggaagtttgctgtcgagcggcctgggttccgtggg | SEQ ID NO: 148 |
| caaggccgtgggaggcagcgttggctgcttcgacacactgagggcggcgcgatgggagac | |
| gagatggatgccatgattcccgagcgggagatgaaggattttcagtttagagcgctaaag | |
| aaggtgagaatctttgactcccctgaggaattgcccaaggaacgctcgagtctgcttgct | |
| gtgtccaacaaatatggtctggtcttcgctggtggagccagtggcttgcagatttttcct | |
| actaaaaatcttcttattcaaaataaacccggagatgatcccaacaaaatagttgataaa | |
| gtccaaggcttgctagttcctatgaaattcccaatccatcacctggccttgagctgtgat | |
| aacctcacactctctgcgtgcatgatgtccagtgaatatggttccattattgcttttttt | |
| gatgttcgcacattctcaaatgaggctaaacagcaaaaacgcccatttgcctatcataag | |
| cttttgaaagatgcaggaggcatggtgattgatatgaagtggaaccccactgtcccctcc | |
| atggtggcagtttgtctggctgatggtagtattgctgtcctgcaagtcacggaaacagtg | |
| aaagtatgtgcaactcttccttccacggtagcagtaacctctgtgtgctggagccccaaa | |
| ggaaagcagctggcagtgggaaaacagaatggaactgtggtccagtatcttcctactttg | |
| caggaaaaaaaagtcattccttgtcctccgttttatgagtcagatcatcctgtcagagtt | |
| ctggatgtgctgtggattggtacctacgtcttcgccatagtgtatgctgctgcagatggg | |
| accctggaaacgtctccagatgtggtgatggctctactaccgaaaaaagaagaaaagcac | |
| ccagagatatttgtgaactttatggagccctgttatggcagctgcacggagagacagcat | |
| cattactacctcagttacattgaggaatgggatttagtgctggcagcatctgcggcttca | |
| acagaagttagtatccttgctcgacaaagtgatcagattaattgggaatcttggctactg | |
| gaggattctagtcgagctgaattgcctgtgacagacaagagtgatgactccttgcccatg | |
| ggagttgtcgtagactatacaaaccaagtggaaatcaccatcagtgatgaaaagactctt | |
| cctcctgctccagttctcatgttactttcaacagatggtgtgctttgtccattttatatg | |
| attaatcaaaatcctggggttaagtctctcatcaaaacaccagagcgactttcattagaa | |
| ggagagcgacagcccaagtcaccaggaagtactcccactaccccaacctcctctcaagcc | |
| ccacagaaactggatgcttctgcagctgcagcccctgcctctctgccaccttcatcacct | |
| gctgctcccattgccactttttctttgcttcctgctggtggagcccccactgtgttctcc | |
| tttggttcttcatctttgaagtcatctgctacggtcactggggagcccccttcatattcc | |
| agtggctccgacagctccaaagcagccccaggccctggcccatcaaccttctcttttgtt | |
| cccccttctaaagcctccctagcccccacccctgcagcgtctcctgtggctccatcagct | |
| gcttcattctcctttggatcatctggttttaagcctaccctggaaagcacaccagtgcca | |
| agtgtgtctgctccaaatatagcaatgaagccctccttcccaccctcaacctctgctgtc | |
| aaagtcaaccttagtgaaaagtttactgctgcagctacctctactcctgttagtagctcc | |
| cagagcgcacccccgatgtcgccattctcttctgcctccaagccagctgcttctggacca | |
| ctcagccaccccacacctctctcagcaccacctagttccgtgccattgaagtcctcagtc | |
| ttgccctcaccatcaggacgatctgctcagggcagttcaagcccagtgccctcaatggta | |
| cagaaatcacccaggataacccctccagcggcaaagccaggctctccccaggcaaagtca | |
| cttcagcctgctgttgcagaaaagcagggacatcagtggaaagattcagatcctgtaatg | |
| gctggaattggggaggagattgcacactttcagaaggagttggaagagttaaaagcccga | |
| acttccaaagcctgtttccaagtgggcacttctgaggagatgaagatgctgcgaacagaa | |
| tcagatgacttgcatacctttcttttggagattaaagagaccacagagtcgcttcatgga | |
| gatataagtagcctgaaaacaactttacttgagggctttgctggtgttgaggaagccaga | |
| gaacaaaatgaaagaaatcgtgactctggttatctgcatttgctttataaaagaccactg | |
| gatcccaagagtgaagctcagcttcaggaaattcggcgccttcatcagtatgtgaaattt | |
| gctgtccaagatgtgaatgatgttctagacttggagtgggatcagcatctggaacaaaag | |
| aaaaaacaaaggcacctgcttgtgccagagcgagagacactgtttaacaccctagccaac | |
| aatcgggaaatcatcaaccaacagaggaagaggctgaatcacctggtggatagtcttcag | |
| cagctccgcctttacaaacagacttccctgtggagcctgtcctcggctgttccttcccag | |
| agcagcattcacagttttgacagtgacctggaaagcctgtgcaatgctttgttgaaaacc | |
| accatagaatctcacaccaaatccttgcccaaagtaccagccaaactgtcccccatgaaa | |
| caggcacaactgagaaacttcttggccaagaggaagaccccaccagtgagatccactgct | |
| ccagccagcctgtctcgatcagcctttctgtctcagagatattatgaagacttggatgaa | |
| gtcagctcaacgtcatctgtctcccagtctctggagagtgaagatgcacggacgtcctgt | |
| aaagatgacgaggcagtggttcaggcccctcggcacgcccccgtggttcgcactccttcc | |
| atccagcccagtctcttgccccatgcagcaccttttgctaaatctcacctggttcatggt | |
| tcttcacctggtgtgatgggaacttcagtggctacatctgctagcaaaattattcctcaa | |
| ggggccgatagcacaatgcttgccacgaaaaccgtgaaacatggtgcacctagtccttcc | |
| caccccatctcagccccgcaggcagctgccgcagcagcactcaggcggcagatggccagt | |
| caggcaccagctgtaaacactttgactgaatcaacgttgaagaatgtccctcaagtggta | |
| aatgtgcaggaattgaagaataaccctgcaaccccttctacagccatgggttcttcagtg | |
| ccctactccacagccaaaacacctcacccagtgttgaccccagtggctgctaaccaagcc | |
| aagcaggggtctctaataaattcccttaagccatctgggcctacaccagcatccggtcag | |
| ttatcatctggtgacaaagcttcagggacagccaagatagaaacagctgtgacttcaacc | |
| ccatctgcttctgggcagttcagcaagcctttctcattttctccatcagggactggcttt | |
| aattttgggataatcacaccaacaccgtcttctaatttcactgctgcacaaggggcaaca | |
| ccctccactaaagagtcaagccagccggacgcattctcatctggtgggggaagcaaacct | |
| tcttatgaggccattcctgaaagctcacctccctcaggaatcacatccgcatcaaacacc | |
| accccaggagaacctgccgcatctagcagcagacctgtggcaccttctggaactgctctt | |
| tccaccacctctagtaagctggaaaccccaccgtccaagctgggagagcttctgtttcca | |
| agttctttggctggagagactctgggaagtttttcaggactgcgggttggccaagcagat | |
| gattctacaaaaccaaccaataaggcttcatccacaagcctaactagtacccagccaacc | |
| aagacgtcaggcgtgccctcagggtttaattttactgcccccccggtgttagggaagcac | |
| acggagccccctgtgacatcctctgcaaccaccacctcagtagcaccaccagcagccacc | |
| agcacttcctcaactgccgtttttggcagtctgccagtcaccagtgcaggatcctctggg | |
| gtcatcagttttggtgggacatctctaagtgctggcaagactagtttttcatttggaagc | |
| caacagaccaatagcacagtgcccccatctgccccaccaccaactacagctgccactccc | |
| cttccaacatcattccccacattgtcatttggtagcctcctgagttcagcaactaccccc | |
| tccctgcctatgtccgctggcagaagcacagaagaggccacttcatcagctttgcctgag | |
| aagccaggtgacagtgaggtctcagcatcagcagcctcacttctagaggagcaacagtca | |
| gcccagcttccccaggctcctccgcaaacttctgactctgttaaaaaagaacctgttctt | |
| gcccagcctgcagtcagcaactctggcactgcagcatctagtactagtcttgtagcactt | |
| tctgcagaggctaccccagccaccacgggggtccctgatgccaggacggaggcagtacca | |
| cctgcttcctccttttctgtgcctgggcagactgctgtcacagcagctgctatctcaagt | |
| gcaggccctgtggccgtcgaaacatcaagtacccccatagcctccagcaccacgtccatt | |
| gttgctcccggcccatctgcagaggcagcagcatttggtaccgtcacttctggctcatcc | |
| gtctttgctcagcctcctgctgccagttctagctcagctttcaaccagctcaccaacaac | |
| acagccactgccccctctgccacgcccgtgtttgggcaagtggcagccagcaccgcacca | |
| agtctgtttgggcagcagactggtagcacagccagcacagcagctgccacaccacaggtc | |
| agcagctcagggtttagcagcccagcttttggtaccacagccccaggggtctttggacag | |
| acaaccttcgggcaggcctcagtctttgggcagtcggcgagcagtgctgcaagtgtcttt | |
| tccttcagtcagcctgggttcagttccgtgcctgccttcggtcagcctgcttcctccact | |
| cccacatccaccagtggaagtgtctttggtgccgcctcaagtaccagtagctccagttcc | |
| ttctcatttggacagtcttctcccaacacaggaggggggctgtttggccaaagcaacgct | |
| cctgcttttgggcagagtcctggctttggacagggaggctctgtctttggtggtacctca | |
| gctgccaccacaacagcagcaacctctgggttcagcttttgccaagcttcaggttttggg | |
| tctagtaatactggttctgtgtttggtcaagcagccagtactggtggaatagtctttggc | |
| cagcaatcatcctcttccagtggtagcgtgtttgggtctggaaacactggaagaggggga | |
| ggtttcttcagtggccttggaggaaaacccagtcaggatgcagccaacaaaaacccattc | |
| agctcggccagtgggggctttggatccacagctacctcaaatacctctaacctatttgga | |
| aacagtggggccaagacatttggtggatttgccagctcgtcgtttggagagcagaaaccc | |
| actggcactttcagctctggaggaggaagtgtggcatcccaaggctttgggttttcctct | |
| ccaaacaaaacaggtggcttcggtgctgctccagtgtttggcagccctcctacttttggg | |
| ggatcccctgggtttggaggggtgccagcattcggttcagccccagcctttacaagccct | |
| ctgggctcgacgggaggcaaagtgttcggagagggcactgcagctgccagcgcaggagga | |
| ttcgggtttgggagcagcagcaacaccacatccttcggcacgctcgcgagtcagaatgcc | |
| cccactttcggatcactgtcccaacagacttctggttttgggacccagagtagcggattc | |
| tctggttttggatcaggcacaggagggttcagctttgggtcaaataactcgtctgtccag | |
| ggttttggtggctggcgaagctgagggcgtgtcagcaggcctttcgatccctgggaccaa | |
| ccgcatcctcagcttcttccccgagaaatgctggagcaggctgttcagaccgacgttgcc | |
| atcaaaacacatacacccagaaagaaacaacagaaaccaaaactcacaaggcgcatgatt | |
| acttgttttatatttcatgttgggttttccctcccactattaaacagtctgtttccgtac | |
| aaaaaaaaaaaaaa | |

[0279] TABLE 158

| | |
|---|---|
| cbe_3606990 Prey1053670 | |
| Homo sapiens, Similar to CG5604 gene product, clone MGC: 11330, mRNA, complete | |
| cds. | |
| length = 1206 | |
| ggcacgaggctcaggaaaccagggctgtcacgtgtataacctcaggtttgtcacgtgtat | SEQ ID NO: 149 |
| aacctcaggaaaccagggctgtcacgtgtataacccaggtttcctgaggtttgtgagggt | |
| tttatgtggcatgtcttctgatgaaaggaaagcattcttgcagtttaccactggttgttc | |
| aactctacccccaggtggactggctaacctgcatcccaggctcacggttgtacgcaaggt | |
| tgatgctactgatgcaagctatccatcagtcaatacatgtgtgcattaccttaagttgcc | |
| tgaatattcttccgaggagatcatgagagagcgcctgctagctgctacaatggagaaagg | |
| ctttcatttcaattgagctttgaagtgcaatgggagacatcagagactttaaaaatacta | |
| gtgaagcctcttgtgtttgtgtgcagagaagtatatgatccaccatgctaatgacacttg | |
| cctttttttccaccattaaggctttaagaacatgtggaataagttttttagctgctaatg | |
| acaaaacaaatcctgtaactacccagccagcaagtatatagcacagaacactgtgttact | |
| ttacaagggcttatgtgactggaataaggtggtcccacttgactgttccaaagagcagct | |
| tctcagatcttcagtgttcactggtaaatttctaacagtgtatttgtgtaaagtttgtca | |
| tttcatactccatacactacagttgctgtcactgatccctgttttgctggcttttaagct | |
| acttggtcaaaaatcctgcttccttaaaacatagagaattaatgagcatctcaagctttt | |
| tcttttcctttttaatgatgcctgcactatcaagagtattctagtgttctctctttgttt | |
| ggcatataatcatgcaccaaactttttatttctttaaggtgggagtatatttttatttcc | |
| taaatgccatactatgaagatcaaagtcttaagtgtgtttgcagctcaaaaataaagatg | |
| tattaaggggggaaaacctggtctaagtgcaaggcacacttacagcgagttttactttcg | |
| gttgtattttctttgtatattataaacatttatttaacttgttgccgtttgaagtaaaaa | |
| atttccaaaatgtatgctcaacaataatcattaaaatgtttgcagcgtaaaaaaaaaaaa | |
| aaaaaa | |

[0280] TABLE 159

| | |
|---|---|
| cbe_3621798 XPO1 | |
| exportin 1 (CRM1 homolog, yeast) | |
| length = 4148 | |
| aggaaggaaggagcagttggttcaatctctggtaatctatgccagcaattatgacaatgt | SEQ ID NO: 150 |
| tagcagaccatgcagctcgtcagctgcttgatttcagccaaaaactggatatcaacttat | |
| tagataatgtggtgaattgcttataccatggagaaggagcccagcaaagaatggctcaag | |
| aagtactgacacatttaaaggagcatcctgatgcttggacaagagtcgacacaattttgg | |
| aattttctcagaatatgaatacgaaatactatggactacaaattttggaaaatgtgataa | |
| aaacaaggtggaagattcttccaaggaaccagtgcgaaggaataaaaaaatacgttgttg | |
| gcctcattatcaagacgtcatctgacccaacttgtgtagagaaagaaaaggtgtatatcg | |
| gaaaattaaatatgatccttgttcagatactgaaacaagaatggcccaaacattggccaa | |
| cttttatcagtgatattgttggagcaagtaggaccagcgaaagtctctgtcaaaataata | |
| tggtgattcttaaactcttgagtgaagaagtatttgatttctctagtggacagataaccc | |
| aagtcaaatctaagcatttaaaagacagcatgtgcaatgaattctcacagatatttcaac | |
| tgtgtcagtttgtaatggaaaattctcaaaatgctccacttgtacatgcaaccttggaaa | |
| cattgctcagatttctgaactggattcccctgggatatatttttgagaccaaattaatca | |
| gcacattgatttataagttcctgaatgttccaatgtttcgaaatgtctctctgaagtgcc | |
| tcactgagattgctggtgtgagtgtaagccaatatgaagaacaatttgtaacactattta | |
| ctctgacaatgatgcaactaaagcagatgcttcctttaaataccaatattcgacttgcgt | |
| actcaaatggaaaagatgatgaacagaacttcattcaaaatctcagtttgtttctctgca | |
| cctttcttaaggaacatgatcaacttatagaaaaaagattaaatctcagggaaactctta | |
| tggaggcccttcattatatgttgttggtatctgaagtagaagaaactgaaatctttaaaa | |
| tttgtcttgaatactggaatcatttggctgctgaactctatagagagagtccattctcta | |
| catctgcctctccgttgctttctggaagtcaacattttgatgttcctcccaggagacagc | |
| tatatttgcccatgttattcaaggtccgtttattaatggttagtcgaatggctaaaccag | |
| aggaagtattggttgtagagaatgatcaaggagaagttgtgagagaattcatgaaggata | |
| cagattccataaatttgtataagaatatgagggaaacattggtttatcttactcatctgg | |
| attatgtagatacagaaagaataatgacagagaagcttcacaatcaagtgaatggtacag | |
| agtggtcatggaaaaatttgaatacattgtgttgggcaataggctccattagtggagcaa | |
| tgcatgaagaggacgaaaaacgatttcttgttactgttataaaggatctattaggattat | |
| gtgaacagaaaagaggcaaagataataaagctattattgcatcaaatatcatgtacatag | |
| taggtcaatacccacgttttttgagagctcactggaaatttctgaagactgtagttaaca | |
| agctgttcgaattcatgcatgagacccatgatggagtccaggatatggcttgtgatactt | |
| tcattaaaatagcccaaaaatgccgcaggcatttcgttcaggttcaggttggagaagtga | |
| tgccatttattgatgaaattttgaacaacattaacactattatttgtgatcttcagcctc | |
| aacaggttcatacgttttatgaagctgtggggtacatgattggtgcacaaacagatcaaa | |
| cagtacaagagcacttgatagaaaagtacatgttactccctaatcaagtgtgggatagta | |
| taatccagcaggcaaccaaaaatgtggatatactgaaagatcctgaaacagtcaagcagc | |
| ttggtagcattttgaaaacaaatgtgagagcctgcaaagctgttggacacccctttgtaa | |
| ttcagcttggaagaatttatttagatatgcttaatgtatacaagtgcctcagtgaaaata | |
| tttctgcagctatccaagctaatggtgaaatggttacaaagcaaccattgattagaagta | |
| tgcgaactgtaaaaagggaaactttaaagttaatatctggttgggtgagccgatccaatg | |
| atccacagatggtcgctgaaaattttgttccccctctgttggatgcagttctcattgatt | |
| atcagagaaatgtcccagctgctagagaaccagaagtgcttagtactatggccataattg | |
| tcaacaagttagggggacatataacagctgaaatacctcaaatatttgatgctgtttttg | |
| aatgcacattgaatatgataaataaggactttgaagaatatcctgaacatagaacgaact | |
| ttttcttactacttcaggctgtcaattctcattgtttcccagcattccttgctattccac | |
| ctacacagtttaaacttgttttggattccatcatttgggctttcaaacatactatgagga | |
| atgtcgcagatacgggcttacagatactttttacactcttacaaaatgttgcacaagaag | |
| aagctgcagctcagagtttttatcaaacttatttttgtgatattctccagcatatctttt | |
| ctgttgtgacagacacttcacatactgctggtttaacaatgcatgcatcaattcttgcat | |
| atatgtttaatttggttgaagaaggaaaaataagtacatcattaaatcctggaaatccag | |
| ttaacaaccaaatctttcttcaggaatatgtggctaatctccttaagtcggccttccctc | |
| acctacaagatgctcaagtaaagctctttgtgacagggcttttcagcttaaatcaagata | |
| ttcctgctttcaaggaacatttaagagatttcctagttcaaataaaggaatttgcaggtg | |
| aagacacttctgatttgtttttggaagagagagaaatagccctacggcaggctgatgaag | |
| agaaacataaacgtcaaatgtctgtccctggcatctttaatccacatgagattccagaag | |
| aaatgtgtgattaaaatccaaattcatgctgttttttttctctgcaactccgttagcaga | |
| ggaaaacagcatgtgggtatttgtcgaccaaaatgatgccaatttgtaaattaaaatgtc | |
| acctagtggccctttttcttatgtgtttttttgtataagaaattttctgtgaaatatcct | |
| tccattgtttaagcttttgttttggtcatctttatttagtttgcatgaagttgaaaatta | |
| aggcatttttaaaaattttacttcatgcccatttttgtggctgggctggggggaggaggc | |
| aaattcaatttgaacatatacttgtaattctaatgcaaaattatacaatttttcctgtaa | |
| acaataccaatttttaattagggagcattttccttctagtctatttcagcctagaagaaa | |
| agataatgagtaaaacaaattgcgttgtttaaaggattatagtgctgcattgtctgaagt | |
| tagcacctcttggactgaatcgtttgtctagactacatgtattacaaagtctctttggca | |
| agattgcagcaagatcatgtgcatatcatcccattgtaaagcgacttcaaaaatatggga | |
| acacagttagttatttttacacagttctttttgtttttgtgtgtgtgtgctgtcgcttgt | |
| cgacaacagctttttgttttcctcaatgaggagtgttgctcatttgtgagccttcattaa | |
| ctcgaagtgaaatggttaaaaatatttatcctgttagaataggctgcatctttttaacaa | |
| ctcattaaaaaacaaaacaactctggcttttgagatgacttatactaatttacattgttt | |
| accaagctgtagtgctttaagaacactacttaaaaagcaaaataaacttggtttacattt | |
| aaaaaaaa | |

[0281] TABLE 160

| | |
|---|---|
| cbe_3621899 PCNP | |
| PEST-containing nuclear protein | |
| length = 602 | |
| ttttttttttttgagtttgacaaatttattggtactttagtaaagacattcatctcagtc | SEQ ID NO: 151 |
| atttctctctcccagcttgaccttaggttaatatttcatttgggtcaagaaaataatacg | |
| taggagaggtatgttattttaacaaacaggaaaatggacaaaaaattgatagtttgccta | |
| cattaaagtaagttaaattcatgtatcgatataattaaatcatgtaagaactaagagttc | |
| tatatacatttccattgtcttacttgggcttattctaaacttaaatgctagtgaacaaag | |
| tgttaggaatatacacaggctgcttctctggagttattaccaactaaaagacctcagcaa | |
| gcagctaccaccaataaaacagtctgaagctgcctccaaatataatattgtaggagtttt | |
| caaggaaatttttatactgtatgcntttgtcngtgactatgcntttaaagatgtgtttaa | |
| cggcnaatttaaaaaaagttcntataccatccaaaattcnaaaccacnccctaccatacc | |
| caatctaccaangtatatgtggtgngatcccaaaatggttggaagatgcatttccttccc | |
| cc | |

[0282] TABLE 161

| | |
|---|---|
| cbe_3625721 EIF2B2 | |
| eukaryotic translation initiation factor 2B, subunit 2 beta, 39 kDa | |
| length = 1522 | |
| caggtgtggattccgccggtgaaggctgaaggcagctaccttaaagatgccgggatccgc | SEQ ID NO: 152 |
| agcgaagggctcggagttgtcagagaggatcgagagcttcgtggagaccctgaagcgggg | |
| tggtgggccgcgcagctccgaggaaatggctcgggagaccctagggttgctgcgccagat | |
| catcacggaccaccgctggagcaacgcgggggagctgatggagctgatccgcagagaggg | |
| caggaggatgacggccgctcagccctccgagaccaccgtgggcaacatggtgcggagagt | |
| gctcaagattatccgggaggagtatggcagactccatggacgcagcgacgagagtgatca | |
| gcaggagtccctgcacaaactgttgacatccggaggcctaaacgaggatttcagcttcca | |
| ttatgcccaactccagtccaacatcattgaggcgattaatgagctgctagtggagctgga | |
| agggacaatggagaacattgcagcccaggctctggagcacattcactccaatgaggtgat | |
| catgaccattggcttctcccgaacagtagaggccttcctcaaagaggctgcccgaaagag | |
| gaaattccatgtcattgtagcagagtgtgctcctttctgccagggtcatgaaatggctgt | |
| gaatttgtccaaagcaggtattgagacaactgtcatgactgatgctgccatttttgccgt | |
| tatgtcaagagtcaacaaggtgatcattggcacgaagaccatcctggccaatggggccct | |
| gagagctgtgacaggaactcacactctggcactggcagcaaaacaccattccaccccact | |
| catcgtctgtgcacctatgttcaaactttctccacagttccccaatgaagaagactcatt | |
| tcataagtttgtggctcctgaagaagtcctgccattcacagaaggggacattctggagaa | |
| ggtcagcgtgcattgccctgtgtttgactacgttcccccagagctcattaccctctttat | |
| ctccaacattggtgggaatgcaccttcctacatctaccgcctgatgagtgaactctacca | |
| tcctgatgatcatgttttatgaccgaccacacgtgtcctaagcagattgcttaggcagat | |
| acagaatgaagaggagacttgagtgttgctgctgaagcacatccttgcaatgtgggagtg | |
| cacaggagtccacctaaaaaaaaaatccttgatactgttgcctgcctttttagtcacccc | |
| gtaacaagggcacacatccagcactgtgtcttgcctttcagatcttaacagagcagcagg | |
| gcttaacttgttgattttggagcctcttagtgacctggttgcgtctgtgtcaggaactta | |
| aactttctggttcagtagtgtgttaaacataacactgaataccttactgggatacagatt | |
| tttgctcagaaatggctatgacactttttctaggctctaccaataaaagccacttgaagg | |
| ttcaaaaaaaaaaaaaaaaaaa | |

[0283] TABLE 162

| | |
|---|---|
| cbe_3641816 ANKH | |
| ankylosis, progressive homolog (mouse) | |
| length = 4031 | |
| ctcttttttttcccggcagatctttgttgtgtgggagggcagcagggatggacttgagct | SEQ ID NO: 153 |
| tgcggatcccctgctagagcagccgcgctcggagaaggcgccgcagccgcgaggaggagc | |
| cgccgccgccgcgcccgaggccccgccgcccgcggcctctgtcggcccgcgccccgctcg | |
| cccgtcgcccccgtcgcccctcgcctccccgcagagtcccctcgcggcagcagatgtgtg | |
| tggggtcagcccacggcggggactatggtgaaattcccggcgctcacgcactactggccc | |
| ctgatccggttcttggtgcccctgggcatcaccaacatagccatcgacttcggggagcag | |
| gccttgaaccggggcattgctgctgtcaaggaggatgcagtcgagatgctggccagctac | |
| gggctggcgtactccctcatgaagttcttcacgggtcccatgagtgacttcaaaaatgtg | |
| ggcctggtgtttgtgaacagcaagagagacaggaccaaagccgtcctgtgtatggtggtg | |
| gcaggggccatcgctgccgtctttcacacactgatagcttatagtgatttaggatactac | |
| attatcaataaactgcaccatgtggacgagtcggtggggagcaagacgagaagggccttc | |
| ctgtacctcgccgcctttcctttcatggacgcaatggcatggacccatgctggcattctc | |
| ttaaaacacaaatacagtttcctggtgggatgtgcctcaatctcagatgtcatagctcag | |
| gttgtttttgtagccattttgcttcacagtcacctggaatgccgggagcccctgctcatc | |
| ccgatcctctccttgtacatgggcgcacttgtgcgctgcaccaccctgtgcctgggctac | |
| tacaagaacattcacgacatcatccctgacagaagtggcccggagctggggggagatgca | |
| acaataagaaagatgctgagcttctggtggcctttggctctaattctggccacacagaga | |
| atcagtcggcctattgtcaacctctttgtttcccgggaccttggtggcagttctgcagcc | |
| acagaggcagtggcgattttgacagccacataccctgtgggtcacatgccatacggctgg | |
| ttgacggaaatccgtgctgtgtatcctgctttcgacaagaataaccccagcaacaaactg | |
| gtgagcacgagcaacacagtcacggcagcccacatcaagaagttcaccttcgtctgcatg | |
| gctctgtcactcacgctctgtttcgtgatgttttggacacccaacgtgtctgagaaaatc | |
| ttgatagacatcatcggagtggactttgcctttgcagaactctgtgttgttcctttgcgg | |
| atcttctccttcttcccagttccagtcacagtgagggcgcatctcaccgggtggctgatg | |
| acactgaagaaaaccttcgtccttgcccccagctctgtgctgcggatcatcgtcctcatc | |
| gccagcctcgtggtcctaccctacctgggggtgcacggtgcgaccctgggcgtgggctcc | |
| ctcctggcgggctttgtgggagaatccaccatggtcgccatcgctgcgtgctatgtctac | |
| cggaagcagaaaaagaagatggagaatgagtcggccacggagggggaagactctgccatg | |
| acagacatgcctccgacagaggaggtgacagacatcgtggaaatgagagaggagaatgaa | |
| taaggcacgggacgccatgggcactgcagggacagtcagtcaggatgacacttcggcatc | |
| atctcttccctctcccatcgtattttgttcccttttttttgttttgttttggtaatgaaa | |
| gaggccttgatttaaaggtttcgtgtcaattctctagcatactgggtatgctcacactga | |
| cggggggacctagtgaatggtctttactgttgctatgtaaaaacaaacgaaacaactgac | |
| ttcatacccctgcctcacgaaaacccaaaagacacagctgcctcacggttgacgttgtgt | |
| cctcctcccctggacaatctcctcttggaaccaaaggactgcagctgtgccatcgcgcct | |
| cggtcaccctgcacagcaggccacagactctcctgtcccccttcatcgctcttaagaatc | |
| aacaggttaaaactcggcttcctttgatttgcttcccagtcacatggccgtacaaagaga | |
| tggagccccggtggcctcttaaatttcccttccgccacggagttcgaaaccatctactcc | |
| acacatgcaggaggcgggtggcacgctgcagcccggagtccccgttcacactgaggaacg | |
| gagacctgtgaccacagcaggctgacagatggacagaatctcccgtagaaaggtttggtt | |
| tgaaatgccccgggggcagcaaactgacatggttgaatgatagcatttcactctgcgttc | |
| tcctagatctgagcaagctgtcagttctcacccccaccgtgtatatacatgagctaactt | |
| ttttaaattgtcacaaaagcgcatctccagattccagaccctgccgcatgacttttcctg | |
| aaggcttgcttttccctcgcctttcctgaaggtcgcattagagcgagtcacatggagcat | |
| cctaactttgcattttagtttttacagtgaactgaagctttaagtctcatccagcattct | |
| aatgccaggttgctgtagggtaacttttgaagtagatatattacctggttctgctatcct | |
| tagtcataactctgcggtacaggtaattgagaatgtactacggtacttccctcccacacc | |
| atacgataaagcaagacattttataacgataccagagtcactatgtggtcctccctgaaa | |
| taacgcattcgaaatccatgcagtgcagtatatttttctaagttttggaaagcaggtttt | |
| ttcctttaaaaaaattatagacacggttcactaaattgatttagtcagaattcctagact | |
| gaaagaacctaaacaaaaaaatattttaaagatataaatatatgctgtatatgttatgta | |
| atttattttaggctataatacatttcctattttcgcattttcaataaaatgtctctaata | |
| caatacggtgattgcttgtgtgctcaacatacctgcagttgaaacgtattgtatcaatga | |
| acattgtaccttattggcagcagttttataaagtccgtcatttgcatttgaatgtaaggc | |
| tcagtaaatgacagaactatttttcattatgggtaactggggaataaatgggtcactgga | |
| gtaggaatagaagtgcaagctggaaaggcaaaaatgagaaagaaaaaggcaggccctttg | |
| tgtctaccgttttcagtgctgtgtgatcatattgttcctcacagcaaaaaagaatgcaag | |
| ggcataatgttagctgtgaacatgccagggttgcattcacattcctgggtacccagtgct | |
| gatggggtgtgcccacgtggggacatgtccttggcgtgcttcctcagagtggcttttcct | |
| ccattaatacatatatgagtactgaaaaattaagttgcatagctgctttgcagtggtttc | |
| agaggcagatctgagaagattaaaaaaaaatctcaaatgtatcagctttttttaaaggac | |
| attactagaaaattaaacagtattttttaacatgtgtgactttcatgcttctggggttgg | |
| agcttaaagatccaaactgagaaagcaggccgggcatggtggctcatgcctgtaatccca | |
| acactttgggaggccaaggagggtggatcacttaaggtcaggagtttgagaccagcctgg | |
| ccaacatggcgaaaccctgtctctactaaaaacataaaaattagctgggggtggtagcac | |
| atacctgtaatcccagctactcaggaggctgaggcaggagaatttgcttgatcctgggag | |
| gcagaggttgtagtgagccgagatcgcgccatcgcactccagcctgggtgacaagagcaa | |
| aactccatctc | |

[0284] TABLE 163

| | |
|---|---|
| cbe_3643627 DKFZP434I1735 | |
| DKFZP434I1735 protein | |
| length = 5477 | |
| agttattcttcatcctagcatttctgttcgactagcagcagcttggtgtttacactgcat | SEQ ID NO: 154 |
| tgccgtggcattaccctcctacctaacaccactcttggatcgttgccttgaacggcttac | |
| tggacataagtcttcacctgaagcagtgactggcttcagttttgctgtagcagctttgtt | |
| gggagcagtaaaacattgtcctttaggaattcctcatggaaaaggcaagattattatgac | |
| attagcagaggatttgctgtgttctgctgctcaaaacagtcgcctttcagctcagcgcac | |
| acaagctggatggttgctgatttctgctctgatgacattaggtcctgcagttgttagcca | |
| tcaccttgctcgagttctgctgttgtggaagtgtgtctttccagcatctcctaaagatct | |
| agaaacagaaaagagccgaggagattcgtttacatggcaggtgaccctggaaggacgagc | |
| tggtgcactgtgtgctatcaagagctttgtttcccactgtggtgatcttcttactgagga | |
| agtaactcagcgtcttcttccaccacttccttgtgctgtggatttgctaactcagctttc | |
| ttcaatactaaaaatgtatggaagtcctttgaaaacaccgtcagtggtttatagacaaag | |
| actttatgaactgttgattttattacctcctgagacctatgaaggaaacctctgtgctat | |
| cctcagagagctggctgctgacttgactgcccctgatattcaggtggcagcatctacatt | |
| tttacttccacccctctgtcatcaggatgatcttttgatactaagtcctttcctacaaga | |
| gactgaccatagatttattgaagaacagctcctgcttggtaatggtgttgcttgcggaag | |
| tcttgaatatgacccttattcgatttatgagaaagatgtagagggagattcagtgcctaa | |
| gcccttacctccagcactatcagttattagttctgcatccaagctctttggggttgtatg | |
| cgctcatgtgggagaaactcaaaggcttcttatactggaacagcttttggacagtataaa | |
| gcacacaaaaggagctcgtcagcaagtggttcagttacatgttgtttcttcagtttctag | |
| tttcttgaagtacgtggctggctccaagggatgtttaggtccagaagaaatgaaaagatt | |
| tgccttaacattagttatgggagccctagaaagccccaaccccttgctgagatgtgcagc | |
| tgcagagtcatgggctagattagcccaaatggtagatgatggagcttttactgctggatt | |
| agctcaagttagctttgacaaattgaaatcagcaagggatgtggttaccagaacaggaca | |
| ctcattggccttggggtccctacataggtatttaggaggaataagttcttctcaacacct | |
| aaattcttgtattggaatcctttatactttggcgcaggacagcacttctcctgatgtgca | |
| gacctgggcattacattctctatcattgatcattgattctgctggcccactctattatgt | |
| gcatgtggaacctaccctttctcttattataatgttgttgttaaatgtgcctcctactca | |
| tgctgaagttcaccaaagccttggtcgctgtttgaatgcccttattaccacgttaggtcc | |
| agagctacaaggtaacagtacttcaatttctaccttaaggacttcctgtctactgggttg | |
| tgcagtaatgcaagataacccagactgccttgttcaagctcaggccatctcttgccttca | |
| gcagcttcatatgtttgctccacgacatgtcaacttgtctagcctggttagctgcctctg | |
| tgtgaatctttgtagcccctacttgttactgagaagagcagtactggcttgcttacgtca | |
| gcttgtacaaagagaagcagctgaagtttcagaacatgctgttatgcttgctaaggatag | |
| cagagaagagttgactccagatgctaacatcagagaagttggccttgagggggcattgtt | |
| gatcttactagacaaggagacagatgagagattatgccatgatatcaaagagactttaaa | |
| ttatatgcttacatctatggcagtggaaaaactctccctgtggttaaagctttgtaaaga | |
| tgtacttgctgcatcagctgattttacagctgtaacttgtgtggatacaatgcaagaaga | |
| agaaggagataaaggggatgatgcctcagtcctgaccaccagacgtgatgaaaaatccca | |
| tccttttaccaatccccgatgggctactagagtctttgctgctgaatgtgtctgtaggat | |
| aattaaccaatgtgagaatgctaacagtgcacattttgacattgctttagcacaagaaat | |
| gaaaaaaagagattcaagaaatgactttttggtactgcatcttgctgacttaattcgcat | |
| ggcttttatggctgccacagatcacagtgaccagctccgtctttctggccttgaaatgct | |
| gttagttgttattcggcgatttgcaactgttccagaaccagagtttccaggtcatgtgat | |
| tctggaacagtatcaagccaatgtaggagcagcgcttagaccagccttcacttcagagac | |
| accacctgatgtcactgccaaagcatgtcaggtttgcagtgcctggatagcaagtggagt | |
| tgtaagtgaccttaatgatctccgaagagttcatcagttgcttgtttcatcgttaactaa | |
| aatacaggctggaaaagaagctctaagtcacttatataatgaaagtgcttctaccatgga | |
| gatcttagctgtgcttaaagcctgggcagaggtctacataattgctgtgcaaagacataa | |
| aaaccacagacaacctttgaagactaccacctgtttagaagacggtatcagaaatggatc | |
| atgttcatcagatggactgcttgacttagtctatgcagatcttggcacactaagcagact | |
| ctggcttgctgcacttcaggattttgctcttttaactttgccttcagaatttgcctccca | |
| acttcctgctgaaggtggtgctttctacacagcagagactagtgaaaatgcaaaattgca | |
| ttattacaactcctgggcacttatcctccatgctacagcattgtggcttacaagcacggg | |
| ttttgttgttgctgacccagatgaaggagcatctaatctctccaggcctgtaacaccaac | |
| ttccatgtgtcagggttcatcatctggggctaccataaagtcccctgaggatgtctacac | |
| tgatagattccatcttattttaggaatcagcgtggaatttctatgttccttacgttcaga | |
| tgcaaccatggaaagcataactgcttgtttacatgcattgcaagcacttctagatgtacc | |
| ttggcccagatcaaaaattggcagtgatcaggacttgggtatagaattgctgaatgttct | |
| acatcgagtaattttaaccagagaatcaccttccattcagttggcttcacttgaagtggt | |
| aaggcagattatctgtgctgctcaagaacatgtgaaggaaaaaagacgaagtgcagaagt | |
| tgatgatggggctgctgaaaaggaaactctgccagagtttggagagggaaaggacaccgg | |
| aggacttgtgcctggaaagtctttggtctttgcaacactggaattgtgtgtatgcattct | |
| agttagacagctcccagaattaaaccctaaattgacaggtagcccaggagtaaaagctac | |
| gaagccacagatactattagaagatggaagtagattggtttcagctgcattggttatcct | |
| ttccgaacttcctgcagtgtgctctcctgaaggaagcatctcaattctccctactatatt | |
| gtacctcacaatcggggtcctcagagagactgctgtgaagttacctgggggccagttatc | |
| ttcgacagttgcagcttccctacaggctttaaaaggaatattatcttctcccatggcccg | |
| ggcagaaaagagccgtactgcttggactgaccttctccgaagtgccttaacaacaattct | |
| tgactgttgggatccagttgatgaaacacaccaagaacttgatgaagtcagtctacttac | |
| tgctatcacagtgtttattttgtctaccagtccagaagtaactaccatcccatgccttca | |
| gaagcgctgtattgataaatttaaagctactcttgagataaaagatcctgtggtacaaat | |
| caagacctaccagctcctacattccatctttcagtatccaaatccagctgtttcctaccc | |
| atacatttactctttagcatcctgtatcatggaaaaactgcaggaaatagacaagagaaa | |
| acctgaaaacactgctgagcttgagatcttccaagaaggcataaaggtcttagaaacact | |
| ggttactgttgctgaagaacaccatcgcgctcagctggtggcctgtcttttgcccatcct | |
| catttccttccttttggatgaaaattctctgggatcagcaacttccataatgagaaattt | |
| acatgactttgctctacaaaatctcatgcaaattggacctcagtattcatctgtttttaa | |
| aagtttagtggcttcttctccagccctaaaagcccgccttgaggctgctataaagggcaa | |
| tcaggaaagtgtcaaagtcaagataccaacatctaaatatactaagagtcctggaaaaaa | |
| ctcaagcatccaattaaagaccagtttcctctgattttttttttggaatagtaagcacct | |
| taatataataaatacttgatcattgcctttggtgacaaaagggacattgtagacacaagt | |
| gcccttagaggtctagttgattgttttaccttaaatagctgtgactcttcaaagtaacag | |
| catacttaacatttttgtgtgtgtgcgtggggtttgtgttttgttttgttttgtttttct | |
| atttaaaaagacaatggagctaacttgccaggaattttaagaaagtgctaaagaactaaa | |
| cttactaaacaatccactgctttaaaaatgaaatgaatttcttctaacagtccatacata | |
| tgtggtatacttaatactgtgacagatataaatatgactctagtgtaaattatctgcact | |
| aatattgtatcccaattgctgatttaaaattctgctttggcccggcacagtggctcatcc | |
| ctgtaattccagcactttggaaggccaaggcgggcggatcacgaggtcgggagtttgaga | |
| ccagcctgaccaacatggtgaaaccccgtctctactaaaaatacaaaaattagccgggtg | |
| tggtggcacacacctgtaatcccagctactcaggaggccgaggcaggaaaatcgcttgaa | |
| cctggcaggcagaggttgcagtgagccaagattgtgccactgcactccagcctgggcgac | |
| agagtgagactccatct | |

[0285] TABLE 164

| | |
|---|---|
| cbe_3663966 KIAA1389 | |
| KIAA1389 protein | |
| length = 5801 | |
| caggcaaggcttatctggtgaaaacttttttgctatgctcagagggtaccgagtagaaaa | SEQ ID NO: 155 |
| ttatgacccaaaagggaccattgctttgtggtcataattttctactcggtaccctctgag | |
| catagcaaattatgaccacaaagcaatggtcccttttgggttccctgaatttttccgctg | |
| tgaccctgcaatctctccgagccttcatgcagcagcacagatttctaggggagaatttgt | |
| ccgcatctcaggattagattatgtggacagtgccctcctgatggggagagacagggacaa | |
| gcctttcaaacggaggttgaaatcagagtcggtggaaacatctctcttccgaaagcttcg | |
| aactgttaaaagtgagcacgaaactttcaagttcacgtctgagctggaggagagccgact | |
| ggagaggggcattcgcccttggaattgtcagcgatgttttgcacattatgatgtccagag | |
| cattttgtttaatatcaacgaagccatggctacgagggctaatgtggggaaaaggaaaaa | |
| cataaccactggggcatctgcagcatcccagactcagatgcctacgggccagacaggcaa | |
| ctgtgagtcccctttagggagcaaggaggacctcaactccaaagagaacctggatgccga | |
| tgagggtgatgggaaaagtaacgacctcgtccttagttgtccttactttagaaatgagac | |
| tggaggggaaggcgacaggcggattgcgctctctcgagccaactcatcctctttcagttc | |
| tggggaaagctgctctttcgaatcgtcactcagctctcactgcacaaatgcaggtgtctc | |
| cgtcttggaagtgcccagagaaaaccagcctattcacagggagaaagtgaagcgctacat | |
| catagaacacattgaccttggggcctattattaccgcaaattcttctatgggaaagagca | |
| ccaaaactactttggaatagatgaaaaccttggtccagtagcagtcagcatccggagaga | |
| gaaggtggaagatgccaaggagaaagaaggatcccagttcaactacagggtggctttcag | |
| gacaagtgagcttacaacactgagaggagcaattttagaagatgctataccctctactgc | |
| taggcatggtaccgcacgaggactacctctcaaagaagttttggaatacgtcattccaga | |
| gctgagcattcagtgtttgcgacaggcttccaactcacccaaggtctcagagcagctgct | |
| caagcttgatgaacaagggctgagctttcagcacaagatcgggatcctttattgcaaagc | |
| aggccagagcacagaggaagagatgtataacaatgagacggcgggaccagcttttgaaga | |
| attccttgatcttctgggccagagagtccgactgaaaggatttagtaaatatcgagctca | |
| gctagacaataagactgattccacgggcacgcactctctctataccacatacaaagacta | |
| cgaactcatgttccacgtgtcaaccctgcttccctacatgcccaacaacagacaacagct | |
| actgaggaaaaggcacataggaaatgacatcgtcaccatcgtcttccaggagcctggggc | |
| acttccttttactccaaaaagcatccggtctcactttcagcatgtctttgtcatagtcaa | |
| agtgcataatccatgtaccgaaaatgtgtgttatagtgttggagtttccagatcaaaaga | |
| tgtgccaccatttggcccaccgattcccaaaggtgtaacttttccaaagtcagccgtgtt | |
| ccgggacttccttttagccaaagtaatcaatgcagaaaatgcagcccataaatcagaaaa | |
| gtttcgagcaatggccactcgaacgaggcaggagtacttgaaagatctggcggagaactt | |
| tgtcacaaccgccaccgtggatacctctgtgaagttcagcttcattacgctgggtgcgaa | |
| gaaaaaggagaaggtaaagccaaggaaggatgcccacttgtttagcattggggccatcat | |
| gtggcacgtgatagcccgggacttcggccagtctgctgacattgaatgtcttctcgggat | |
| ctccaatgagttcatcatgttgattgaaaaggattccaagaatgttgtattcaactgttc | |
| ctgcagggatgtgattgggtggacatctggattagtgagtatcaaagtgttttacgaaag | |
| aggagaatgtgtcctcctgtcctcggtagacaactgtgctgaagacatcagggaaattgt | |
| tcagcgattagtaatagtgacgagaggctgcgagactgtggaaatgaccctgaggaggaa | |
| cgggctgggccagcttggcttccatgtgaattttgaaggaattgtcgcagatgtggaacc | |
| ttttggctttgcctggaaggctggccttcgccaagggagccgcctcgtggagatctgcaa | |
| agtagccgtggccactctgacccacgagcagatgatcgacctgctccgtacttctgtgac | |
| tgtgaaggtggtcatcatccagccccatgatgacggctcgccccgaagagggtgttcaga | |
| gctctgccggatccctatggtggaatataaactcgacagcgagggcaccccctgcgagta | |
| taaaacccccttcaggaggaacactacgtggcaccgggtgcccactcctgccctgcagcc | |
| cctctctagagcttcccccatccccggcacgcccgaccggctgccgtgccaacagctgct | |
| ccagcaggcccaggctgccattcctcgaagcacctccttcgaccggaagctgcccgatgg | |
| cacgagaagctcacccagcaaccagtcatcctccagcgaccctggacccggcgggagcgg | |
| accctggagaccacaagtgggctacgacgggtgccagtcccctctactgctcgaacacca | |
| gggctcaggccctttggaatgtgacggagccagggagagggaagacaccatggaagcaag | |
| caggcacccggaaaccaaatggcatggcccaccttccaaagtcctgggttcctataaaga | |
| aagagctctgcagaaagatggaagttgcaaagattcccccaataagctttctcacattgg | |
| ggataaaagttgctccagtcactccagcagcaacacgctctccagcaacacctccagcaa | |
| cagtgacgacaagcactttgggtctggcgacctgatggaccccgaattactggggctgac | |
| ctacatcaaaggggcctccaccgacagtggcatcgacacggccccctgcatgcctgccac | |
| catcctcggccctgtgcacctggcaggcagcaggtccctgatccacagccgggccgagca | |
| gtgggctgatgctgccgacgtctctgggcctgacgacgagccagccaagttatattctgt | |
| gcatggctacgcgtccgccatctccgccggcagtgctgcggaaggcagcatgggcgatct | |
| cagtgagatatcctctcattccagtggttctcaccattcaggaagcccttcagctcactg | |
| ttcaaaaagtagtgggtctctggattcatccaaagtctacatcgtgtctcacagcagcgg | |
| acaacaggttcccgggtccatgtccaagccctaccacagacaaggggcagtgaacaaata | |
| tgtcatcggctggaagaaatcggagggcagcccaccgcccgaggagcctgaagtgactga | |
| atgtcccgggatgtatagtgagatggatgtcatgtccacagcaactcagcatcagacagt | |
| ggtgggagatgctgttgcagagactcaacatgttctgtctaaagaagattttctgaaatt | |
| gatgcttcctgacagccccttagtggaggaggggcgaagaaagttttcgttctatgggaa | |
| cctgtctccaaggaggtcgctttaccgcacgctgtctgacgagagcatctgcagcaacag | |
| gagggggtcctcctttggcagttcccggagttccgtgcttgaccaggccctgcccaacga | |
| cattctgttcagcaccaccccaccctaccacagcacgctgcctccgcgggcccaccccgc | |
| acccagcatggggagcctgagaaatgagttctggttctccgatgggtccttatcagataa | |
| gtccaagtgcgcagatcctggcctgatgcccctcccggacacagccacagggttagattg | |
| gacccacctcgtggatgctgcacgggcatttgaaggtcttgactcagatgaagaactggg | |
| gctgctctgtcaccacacgtcctatctagaccagagggtggcatccttctgcaccctgac | |
| agatatgcagcatgggcaggacctggaaggggcccaagagctgcccttatgtgtagatcc | |
| aggcagtggcaaagagttcatggacacaactggggagcgttctccatcaccactgaccgg | |
| gaaagtcaatcagctggaattaattcttcgacaactccagaccgaccttcggaaggaaaa | |
| acaagacaaggccgttctccaagcagaagtgcagcacctgagacaggacaacatgagact | |
| gcaggaggagtcccagaccgcgacagctcagctgcggaaattcacagaatggtttttcac | |
| caccatcgacaaaaaatcttagccaatccgcacctcatcaagggaccactgggaaatgcc | |
| ccttgtccctttgaagtcacaaacatgtggtttttctgtgtgctttcaaccaatcgtaga | |
| tgtttttgctgttccattctgtgtagcaccattcaccacagcaggatagggagcctcgac | |
| tctttctcggtaaccacggcagagagcagcgccgatgtgaagatgaatgaatgtaactcc | |
| tggtgtgaagatgaatgtaaaccctggcgacagttgagacctttttcttttagactctgc | |
| taaaacagtgctctggcttgggcttacctcaagagggaagatagttgagttttatttcct | |
| gtatatcaggtgacctggtagagatgtaaagcaatttaccatagtttgggctttagtatt | |
| gtaaaataaacatgagaacaaataatcagacatatactttaatgttaaaggtgctctatt | |
| tttttggatgtacagtagttttatttccacagccacattaccatagcaataagaaaggag | |
| gcatagtacatagttggaaaagctttgtggggggattaaaaaaaaaaaaaagcactgttg | |
| tgtttaacactagttcagatgcagttaccttagagacttatttatttgcaggaacaaatg | |
| gtgcctgaatattaacagtgttctgattaaaaacaaaaaaaagatacatatgccttgtaa | |
| atggctcaccgagtggtcagtagtcacttcaactcttagttcacttttgtatagttgctc | |
| tgctggaaagaaatgagagtgaatctgcttactcactagaacttccctgtgtgctgtgag | |
| ccagcggaaccacttgtacaatgccagatttgtttatctttgtacagaagctttgatgaa | |
| gtgtcttgtatttaacacccttatttaagcttatttaaccttaaattgttaattttataa | |
| aatttggtttggcctgcactacgatgagggatggaggtagctgcaggctcagaagagact | |
| gagcttgcacagatcagaccgagaagcagggtgagagattctaacgactggatgctgcta | |
| gtaacacattgtttgtattgctttaccatttttaactgttagatttgagatgaacataca | |
| ttttgcttttttaataaatgtttaaaagaagtccacataag | |

[0286] TABLE 165

| | |
|---|---|
| cbe_3665307 HK1 | |
| hexokinase 1 | |
| length = 3962 | |
| aaaacatctatcttgctgtgtttggacaggccagcccctgaaacatcttgggcaatggag | SEQ ID NO: 156 |
| ggttaacttctcaaagtttaataggcaagaccagcaaccatgcaacaaggacttcaacta | |
| accaactaaagaactgttccccagagcattgttcctgagaaggaaaagagtccaaacacc | |
| tacccacacctgctttgtgccaagaatccacagttggattgcaaggacagtgtatgttgt | |
| ccttttggaaaaatgagagtgagcccaaatgaagaacaagcaaaggcgttcaagacccag | |
| ctgttgagagtagaaaagcagaagaaaggacccgaggtcagcaagtgccctccccacaat | |
| ggggcagatctgccagcgagaatcggctacagcagctgaaaaaccaaaacttcatctact | |
| tgctgaaagtgagcattgttgatgctcttgagagcatcagccaggacattaatgtgcacc | |
| actgtggtggcgtggaaagatggcaaaaagagccctgcgtgattttattgacaagtatct | |
| ctatgccatgcggctctccgatgaaactctcatagatatcatgactcgcttcaggaagga | |
| gatgaagaatggcctctcccgggattttaatccaacagccacagtcaagatgttgccaac | |
| attcgtaaggtccattcctgatggctctgaaaagggagatttcattgccctggatcttgg | |
| tgggtcttcctttcgaattctgcgggtgcaagtgaatcatgagaaaaaccagaatgttca | |
| catggagtccgaggtttatgacaccccagagaacatcgtgcacggcagtggaagccagct | |
| ttttgatcatgttgctgagtgcctgggagatttcatggagaaaaggaagatcaaggacaa | |
| gaagttacctgtgggattcacgttttcttttccttgccaacaatccaaaatagatgaggc | |
| catcctgatcacctggacaaagcgatttaaagcgagcggagtggaaggagcagatgtggt | |
| caaactgcttaacaaagccatcaaaaagcgaggggactatgatgccaacatcgtagctgt | |
| ggtgaatgacacagtgggcaccatgatgacctgtggctatgacgaccagcactgtgaagt | |
| cggcctgatcatcggcactggcaccaatgcttgctacatggaggaactgaggcacattga | |
| tctggtggaaggagacgaggggaggatgtgtatcaatacagaatggggagcctttggaga | |
| cgatggatcattagaagacatccggacagagtttgacagggagatagaccggggatccct | |
| caaccctggaaaacagctgtttgagaagatggtcagtggcatgtacttgggagagctggt | |
| tcgactgatcctagtcaagatggccaaggagggcctcttatttgaagggcggatcacccc | |
| ggagctgctcacccgagggaagtttaacaccagtgatgtgtcagccatcgaaaagaataa | |
| ggaaggcctccacaatgccaaagaaatcctgacccgcctgggagtggagccgtccgatga | |
| tgactgtgtctcagtccagcacgtttgcaccattgtctcatttcgctcagccaacttggt | |
| ggctgccacactgggcgccatcttgaaccgcctgcgtgataacaagggcacacccaggct | |
| gcggaccacggttggtgtcgacggatctctttacaagacgcacccacagtattcccggcg | |
| tttccacaagactctaaggcgcttggtgccagactccgatgtgcgcttcctcctctcgga | |
| gagtggcagcggcaagggggctgccatggtgacggcggtggcctaccgcttggccgagca | |
| gcaccggcagatagaggagaccctggctcatttccacctcaccaaagacatgctgctgga | |
| ggtgaagaagaggatgcgggccgagatggagctggggctgaggaagcagacgcacaacaa | |
| tgccgtggttaagatgctgccctccttcgtccggagaactcccgacgggaccgagaatgg | |
| tgacttcttggccctggatcttggaggaaccaatttccgtgtgctgctggtgaaaatccg | |
| tagtgggaaaaagagaacggtggaaatgcacaacaagatctacgccattcctattgaaat | |
| catgcagggcactggggaagagctgtttgatcacattgtctcctgcatctctgacttctt | |
| ggactacatggggatcaaaggccccaggatgcctctgggcttcacgttctcatttccctg | |
| ccagcagacgagtctggacgcgggaatcttgatcacgtggacaaagggttttaaggcaac | |
| agactgcgtgggccacgatgtagtcaccttactaagggatgcgataaaaaggagagagga | |
| atttgacctggacgtggtggctgtggtcaacgacacagtgggcaccatgatgacctgtgc | |
| ttatgaggagcccacctgtgaggttggactcattgttgggaccggcagcaatgcctgcta | |
| catggaggagatgaagaacgtggagatggtggagggggaccaggggcagatgtgcatcaa | |
| catggagtggggggcctttggggacaacgggtgtctggatgatatcaggacacactacga | |
| cagactggtggacgaatattccctaaatgctgggaaacaaaggtatgagaagatgatcag | |
| tggtatgtacctgggtgaaatcgtccgcaacatcttaatcgacttcaccaagaagggatt | |
| cctcttccgagggcagatctctgagacgctgaagacccggggcatctttgagaccaagtt | |
| tctctctcagatcgagagtgaccgattagcactgctccaggtccgggctatcctccagca | |
| gctaggtctgaatagcacctgcgatgacagtatcctcgtcaagacagtgtgcggggtggt | |
| gtccaggagggccgcacagctgtgtggcgcaggcatggctgcggttgtggataagatccg | |
| cgagaacagaggactggaccgtctgaatgtgactgtgggagtggacgggacactctacaa | |
| gcttcatccacacttctccagaatcatgcaccagacggtgaaggaactgtcaccaaaatg | |
| taacgtgtccttcctcctgtctgaggatggcagcggcaagggggccgccctcatcacggc | |
| cgtgggcgtgcggttacgcacagaggcaagcagctaagagtccgggatccccagcctact | |
| gcctctccagcacttctctcttcaagcggcgaccccctaccctcccagcgagttgcgctg | |
| ggagacgctggcgccagggcctgccggcgcggggaggaaagcaaaatccaactaatggta | |
| tatattgtagggtacagaatagagcgtgtgctgttgataatatctctcacccggatccct | |
| cctcacttgccctgccactttgcatggtttgattttgacctggtcccccacgtgtgaagt | |
| gtagtggcatccatttctaatgtatgcattcatccaacagagttatttattggctggaga | |
| tggaaaatcacaccacctgacaggccttctgggcctccaaagcccatccttggggttccc | |
| cctccctgtgtgaaatgtattatcaccagcagacactgccgggcctccctcccgggggca | |
| ctgcctgaaggcgagtgtgggcatagcattagctgcttcctcccctcctggcacccactg | |
| tggcctggcatcgcatcgtggtgtgtcaatgccacaaaatcgtgtgtccgtggaaccagt | |
| cctagccgcgtgtgacagtcttgcattctgtttgtctcgtggggggaggtggacagtcct | |
| gcggaaatgtgtcttgtcttccatttggataaaaggaaccaaccaacaaacaatgccatc | |
| actggaatttcccaccgctttgtgagccgtgtcgtatgacctagtaaactttgtaccaat | |
| tc | |

[0287] TABLE 166

| | |
|---|---|
| cbe_3670766 ACTC | |
| actin, alpha, cardiac muscle | |
| length = 1294 | |
| atgtgtgacgacgaggagaccaccgccctggtgtgcgacaacggctctgggctggtgaag | SEQ ID NO: 157 |
| gccggctttgcgggcgatgacgcgccccgcgctgtcttcccgtccatcgtgggccgcccg | |
| cggcaccagggagttatggtgggtatgggtcagaaggactcctacgtaggtgatgaagcc | |
| cagagcaagagaggcatcctgaccctgaagtatcccatcgagcatggtatcatcaccaac | |
| tgggacgacatggagaagatctggcaccacaccttctacaatgagctccgtgttgctccc | |
| gaggagcaccccaccctgctcacagaggccccgctgaaccccaaggccaaccgggagaag | |
| atgactcagatcatgtttgagaccttcaatgtccctgccatgtacgtggccatccaggca | |
| gtgctatccctgtatgcttctggccgtaccacaggcattgttctggactctggggatggt | |
| gtaactcacaatgtccccatctatgagggctacgctttgccccatgccatcatgcgtctg | |
| gatctggctggtcgggacctcactgactacctcatgaagatcctcactgagcgtggctac | |
| tcctttgtcaccactgctgaacgtgaaattgtccgtgacattaaagagaagctgtgctat | |
| gtcgccctggattttgagaatgagatggccacagctgcctcttcctcctccttggagaag | |
| agctatgaactgcctgatggccaagtcatcactatcggcaatgagcgcttccgctgtcct | |
| gagacactcttccagccctccttcattggtatggaatctgctggcatccatgaaacaact | |
| tacaatagcatcatgaagtgtgacattgatatccgcaaggacctgtatgccaacaatgtc | |
| ttatctggaggcaccactatgtaccctggtattgctgatcgtatgcagaaggaaatcact | |
| gctctggctcctagcaccatgaagattaagattattgctccccctgagcgtaaatactct | |
| gtctggattgggggctccatcttggcctctctgtccaccttccagcaaatgtggattagc | |
| aagcaagagtacgatgaggcaggcccatccattgtccaccgcaaatgcttctaagatgcc | |
| ttctctctccatctaccttccagtcaggatgacggtattatgcttcttggagtctcccaa | |
| accaccttccctcatctttcatcaatcattgtacagtttgtttacacacgtgcaatttgt | |
| ttgtgcttctaatatttattgctttataaataaa | |

[0288] TABLE 167

| | |
|---|---|
| cbe_3694420 ARHGEF2 | |
| rho/rac guanine nucleotide exchange factor (GEF) 2 | |
| length = 4093 | |
| gggatcccgggagggagcggagcggacctgggcttggtcgcctccaagccggcgggaccg | SEQ ID NO: 158 |
| agtgctttaggccgctcgaaagaaagttgctccgacccgggaaaaggagaagatgaagga | |
| agccaaggatgcccgctataccaatgggcacctcttcaccaccatttcagtttcaggcat | |
| gaccatgtgctatgcctgtaacaagagcatcacagccaaggaagccctcatctgcccaac | |
| ctgcaatgtgactatccacaaccgctgtaaagacaccctcgccaactgtaccaaggtcaa | |
| gcagaagcaacagaaagcggccctgctgaagaacaacaccgccttgcagtccgtttctct | |
| tcgaagtaagacaaccatccgggagcggccaagctcggccatctacccctccgacagctt | |
| ccggcagtccctcctgggctcccgccgtggccgctcctccttgtctttagccaagagtgt | |
| ttctaccaccaacattgctggacatttcaatgatgagtctcccctggggctgcgccggat | |
| cctctcacagtccacagactccctcaacatgcggaaccgaaccctatccgtggaatccct | |
| cattgacgaagaggtaatctacagtgagctgatgagtgactttgagatggatgagaagga | |
| ctttgcagctgactcttggagtcttgctgtggacagcagcttcctgcagcagcataaaaa | |
| ggaggtgatgaagcagcaagatgtcatctatgagctaatccagacagagctgcaccatgt | |
| gaggacactgaagatcatgacccgcctcttccgcacggggatgctggaagagctacactt | |
| ggagccaggagtggtccagggcctgttcccctgcgtggacgagctcagtgacatccatac | |
| acgcttcctcagccagctattagaacgccgacgccaggccctgtgccctggcagcacccg | |
| gaactttgtcatccatcgcttgggtgatctgctcatcagccagttctcaggtcctagtgc | |
| ggagcagatgtgtaagacctactcggagttctgcagccgccacagcaaggccttaaagct | |
| ctataaggagctgtacgcccgagacaaacgcttccagcaattcatccggaaagtgacccg | |
| ccccgccgtgctcaagcggcacggggtacaggagtgcatcctgctggtgactcagcgcat | |
| caccaagtacccgttactcatcagccgcatcctgcagcattcccacgggatcgaggagga | |
| gcgccaggacctgaccacagcactggggctagtgaaggagctgctgtccaatgtggacga | |
| gggtatttatcagctggagaaaggggcccgtctgcaggagatctacaaccgcatggaccc | |
| tcgggcccaaaccccagtgcctggcaagggcccctttggccgagaggaacttctgaggcg | |
| caaactcatccacgatggctgcctgctctggaagacagcgacggggcgcttcaaagatgt | |
| gctagtgctgctgatgacagatgtactggtgtttctccaggaaaaggaccagaagtacat | |
| ctttcctaccctggacaagccttcagtggtatcgctgcagaatctaatcgtacgagacat | |
| tgccaaccaggagaaagggatgtttctgatcagcgcagccccacctgagatgtacgaggt | |
| gcacacagcatcccgggatgaccggagcacctggatccgggtcattcagcagagcgtgcg | |
| cacatgcccatccagggaggacttccccctgattgagacagaggatgaggcttacctgcg | |
| gcgaattaagatggagttgcagcagaaggaccgggcactggtggagctgctgcgagagaa | |
| ggtcgggctgtttgctgagatgacccatttccaggccgaagaggatggtggcagtgggat | |
| ggccctgcccaccctgcccaggggccttttccgctctgagtcccttgagtcccctcgtgg | |
| cgagcggctgctgcaggatgccatccgtgaggtggagggtctgaaagacctgctggtggg | |
| gccaggagtggaactgctcttgacaccccgagagccagccctgcccttggaaccagacag | |
| cggtggtaacacgagtcctggggtcactgccaatggtgaggccagaaccttcaatggctc | |
| cattgaactctgcagagctgactcagactctagccagagggatcgaaatggaaatcagct | |
| gagatcaccgcaagaggaggcgttacagcgattggtcaatctctatggacttctacatgg | |
| cctacaggcagctgtggcccagcaggacactctgatggaagcccggttccctgagggccc | |
| tgagcggcgggagaagctgtgccgagccaactctcgggatggggaggctggcagggctgg | |
| ggctgcccctgtggcccctgaaaagcaggccacggaactggcattactgcagcggcaaca | |
| tgcgctgctgcaggaggagctacggcgctgccggcggctaggtgaagaacgggcaaccga | |
| agctggcagcctggaggcccggctccgggagagtgagcaggcccgggcactgctggagcg | |
| tgaggccgaagaggctcgaaggcagctggccgccctgggccagaccgagccactcccagc | |
| tgaggccccctgggcccgcagacctgtggatcctcggcggcgcagcctccccgcaggcga | |
| tgccctgtacttgagtttcaaccccccacagcccagccgaggcactgaccgcctggatct | |
| acctgtcactactcgctctgtccatcgaaactttgaggaccgagagaggcaggaactggg | |
| gagccccgaagagcggctgcaagacagcagtgaccctgacactggcagcgaggaggaagg | |
| tagcagccgtctgtctccgccccacagtccacgagactttaccagaatgcaggacatccc | |
| ggaggagacggagagccgcgacggggaggctgtagcctccgagagctaagggggcccctc | |
| ccccctgccccgtgccccactgaagaacattactgagggggctaaccttggggactccaa | |
| tttgccaatgatgagggaacatttgaaagaactgcaaattgtccttgccagctcttggga | |
| tccttggatacctggggccatttaagaagctaggggaattaggccacaacaccccctggg | |
| acatccgaaagctacaccacagatgccagtggttcatgccttcttcccgcaactttagga | |
| aaatttatttatttattgtttattagttatggggggagaggggagatttaaaggaccagg | |
| gacatgggaaccaagccatagggatcagagggccttgtccttgaacactactggggtata | |
| ttcaggctcatccacgcagctgctgggttcttgccctaacggccctcccctgcaacatcc | |
| gtcttggaggagaggctgcagccacagcaccctactgccctttaaataaaggagggctgt | |
| gggcagggccatgtccctttctcctctcccctcaacctcttactgctgttctccctttct | |
| ccgtccttcatggaagccctgggagataacctggcttcctggagttgatggaataaaggt | |
| tggggtggccataatggtttgttgggggtgagggaaaaaacccacagggaccagaatgtt | |
| ttgttgttcttttgttttcttttttgtaccaaagtcaactgcacgtgttttatattttta | |
| agagatcgtaggcaattagagatcgaagcctcctatctccacatctctgaagaagttgag | |
| gggtgggggagagaatgacttctgccttcatctgcagtaacggggggacctatactgacc | |
| tcttccccagccatttagaaacaagttctagggtgggttggaaaatctccaagagccctg | |
| acctcatcttccacctcagcaaccatgacctgaaacctcagcgtgaatttgggggatttt | |
| tcagtggaacccttgcccccaaatgtcgaccagcccccaaatgtcgaagaattttcttct | |
| tgccaattttgttgtttaaaaaaaaaattcagggaaaattaaaaacctggaactccaaaa | |
| aaaaaaaaaaaaa | |

[0289] TABLE 168

| | |
|---|---|
| cbe_3705944 TNFAIP1 | |
| tumor necrosis factor, alpha-induced protein 1 (endothelial) | |
| length = 3508 | |
| gccacccagctgagaggagaggcgcccccggggacgcactgagattatgaggctctggcc | SEQ ID NO: 159 |
| tccactggccactcactcgtgaccctttccaccacggcggagccttccaagcctacctcc | |
| tgccgtgtggtgatctacctgcagcgggagatgtcgggggacacctgcctgtgcccagcc | |
| tcaggggccaagcccaagctcagtggcttcaagggaggagggttgggcaacaagtatgtc | |
| cagctcaacgtgggcggctctctgtactacaccactgtgcgggccctgacccgccacgac | |
| accatgctcaaggccatgttcagtgggcgcatggaggtgctgaccgacaaagaaggctgg | |
| atcctcatagaccgttgtggaaagcactttggcaccattttgaattacctccgagatgac | |
| accatcaccctccctcagaaccggcaagaaatcaaggaattgatggctgaagcaaagtat | |
| tacctcatccaggggctggtgaatatgtgccagagtgccctgcaggacaagaaggactcc | |
| taccagcctgtgtgcaacatccccatcatcacatccctaaaggaggaggagcggctcatc | |
| gaatcctccaccaagcccgtggtgaagctgctgtacaacagaagcaacaacaagtattcc | |
| tacaccagcaactctgacgaccacctgctgaaaaacatcgagctgtttgacaagctctcc | |
| ctgcgcttcaacggccgcgtgctcttcatcaaggatgtcattggtgacgagatctgctgc | |
| tggtccttttatggccagggccgtaagctggcagaggtgtgctgtacctccatcgtgtat | |
| gccacggagaagaagcagaccaaggtggaattcccagaggcccgaatctatgaggagaca | |
| ctcaacgtcctactctatgagactccccgcgtccccgacaactccttgttggaggccaca | |
| agccgtagccgcagccaggcttcccccagtgaagatgaggagacctttgaactgcgggac | |
| cgtgtccgccgcatccacgtcaagcgctacagcacttacgatgaccggcagctcggccac | |
| cagtctacccatcgcgactgaccagaccctcagggagtcagggcacgggaggccctatct | |
| cccatcctgtggaacccgccccattggccaccccatgctgctgctgcctgggtctctgct | |
| ctagcacccagaggcatgacaggccctgctcagaggtcagagggtctgggcagaggaggg | |
| accacattcccctgccttgcccctgagcacttctggagactgcgtcctgtcctatctgct | |
| caccatcacccttcctgcccgacggagctgcttctgctccctggggcatatggactgacc | |
| cacctcctgctgagaaccttcccctaggccctgtgcagaaggctactgccccttaggcct | |
| cagctgggggaaaggcagttctggtgctgtagaggccctggtgcagaaagtgggacgtct | |
| tttttcctaaggtgtttaagcacaggcttgataagtttggtttttaaaaaataatctagg | |
| aaatgaataattctaaatctagtaatgaggaaactgagcatttcttttgccctccagggt | |
| gccaagaccctacatatgacagaacccttggcccttctccatgcctgtgggatctgtttc | |
| tttaaagcactttgtactgttattcaggaggttgataatctccttgacccatgtctttct | |
| accctaatccccacttccctgcagaatcaatctgagggaggggataaagaggaagcaata | |
| aaaaaaaaacatccgacagagcagctctggctttgcagcctggccagcagctcagagtgc | |
| accgaggagggaaggatggctaagctgggaccggcagtcctcacagggtgcctgtgagaa | |
| aggacattttacccccacatcatagtcacatcactgactcctaggtctagcacgactgct | |
| ctttgtgattctcttgagtacccttggcttccagccatgctgtcctcacatacggtaaag | |
| ccaaagagctgtcacatgggccagaaacatgagccacggcaggaagaccgtggagcccgt | |
| gggcactgcatggtgttggctggcatgcccatcagctgaggacagcaaactcccagcagc | |
| ccctacagaggtggcacatgcttggccacacatctactccctgcccacaccatctatgct | |
| cttggttggtgctggctgggatggcggttctgcccagtggtgtctctgagcgcgggatga | |
| caggagcaaccgaagcaccctgaaggccttcactccttgttgggtaactcagccatggag | |
| atgccaagcactagccaggaggtgagttcctctttagggctttggttttcattccttttt | |
| gtttggcttggccaaaccagaattcagcttatctgaattattttccaaaggaatgctgtc | |
| agggagggactgttctgccagcctaacaaagcaacgtagccacgtatagtacccactttc | |
| tgctctttggagagaacacaggttatcaagttcatctctcttgactactcttatgatagc | |
| tgatgccacagagcctatgggcaaatgccagacccagggttagacacaaggacctgaagt | |
| gacatgacggcgggacaggggaaatgtgactttctaattaggcattttatgttagtcaca | |
| gtcttgaatgtataaacagcactaagactctcaggtcaggtaccttggtgatcagctact | |
| agttcttccagccctcattgaggtaacaagataaagacaaatccacttctttggccaaat | |
| tcaggctttggctttatgactttcccacagagactggaatgcgtcagcctgagaccactg | |
| gcctattttctcagctgccctcttgaggtcctttaacactcaaattcccagctccccact | |
| gaggtgttgtgatgcttgccttttgacctccccatcccctttagtccctgcttactactt | |
| tgacattcacatcctcagtgtctcagtcttttttgccgagaaagcacagtagtctgggac | |
| tgggcatttatcttctctgactgaaaatctctccttggtcttaaggaaaatactaacatt | |
| gaactcactgacatgatcttagcttctttaatcagactttgtgacttaaaagtttggggg | |
| ttttctttgaaagtttccagccctattcagaaagcaactcttggctgtgtgcatttttca | |
| actccaagcagcccaggggtaagtaaacaaagtatggatgaaggtcagattttcttgtca | |
| gtttctgagaaacctggcagcctgctgttaacaacacaggccagtattgggttttattga | |
| atttggtatgtgaccaaggtcggcctaaaggatggcgcaggtcctgggcaggaaagaatt | |
| tttcctttatcacataactgtaatatttggttgctcagcataagtgatggaagcaaacac | |
| taatttctaataaaattgtgttaaactc | |

[0290] TABLE 169

| | |
|---|---|
| cbe_3714119 Prey1053021 | |
| Sequence 1 from Patent WO0131003. | |
| length = 3331 | |
| gtgattactcactatagggctcgagcggccgcccgggcaggtctatggctgagcctgggc | SEQ ID NO: 160 |
| acagccaccatctctccgccagagtcaggggaagaactgagaggcgcataccccggctgt | |
| ggcggctgctgctctgggctgggaccgccttccaggtgacccagggaacgggaccggagc | |
| ttcatgcctgcaaagagtctgagtaccactatgagtacacggcgtgtgacagcacgggtt | |
| ccaggtggagggtcgccgtgccgcataccccgggcctgtgcaccagcctgcctgaccccg | |
| tcaagggcaccgagtgctccttctcctgcaacgccggggagtttctggatatgaaggacc | |
| agtcatgtaagccatgcgctgagggccgctactccctcggcacaggcattcggtttgatg | |
| agtgggatgagctgccccatggctttgccagcctctcagccaacatggagctggatgaca | |
| gtgctgctgagtccaccgggaactgtacttcgtccaagtgggttccccggggcgactaca | |
| tcgcctccaacacggacgaatgcacagccacactgatgtacgccgtcaacctgaagcaat | |
| ctggcaccgttaacttcgaatactactatccagactccagcatcatctttgagtttttcg | |
| ttcagaatgaccagtgccagcccaatgcagatgactccaggtggatgaagaccacagaga | |
| aaggatgggaattccacagtgtggagctaaatcgaggcaataatgtcctctattggagaa | |
| ccacagccttctcagtatggaccaaagtacccaagcctgtgctggtgagaaacattgcca | |
| taacaggggtggcctacacttcagaatgcttcccctgcaaacctggcacgtatgcagaca | |
| agcagggctcctctttctgcaaactttgcccagccaactcttattcaaataaaggagaaa | |
| cttcttgccaccagtgtgaccctgacaaatactcagagaaaggatcttcttcctgtaacg | |
| tgcgcccagcttgcacagacaaagattatttctacacacacacggcctgcgatgccaacg | |
| gagagacacaactcatgtacaaatgggccaagccgaaaatctgtagcgaggaccttgagg | |
| gggcagtgaagctgcctgcctctggtgtgaagacccactgcccaccctgcaacccaggct | |
| tcttcaaaaccaacaacagcacctgccagccctgcccatatggtccctactccaatggct | |
| cagactgtacccgctgccctgcagggactgaacctgctgtgggatttgaatacaaatggt | |
| ggaacacgctgcccacaaacatggaaacgaccgttctcagtgggatcaacttcgagtaca | |
| agggcatgacaggctgggaggtggctggtgatcacatttacacagctgctggagcctcag | |
| acaatgacttcatgattctcactctggttgtgccaggatttagacctccgcagtcggtga | |
| tggcagacacagagaataaagaggtggccagaatcacatttgtctttgagaccctctgtt | |
| ctgtgaactgtgagctctacttcatggtgggtgtgaattctaggaccaacactcctgtgg | |
| agacgtggaaaggttccaaaggcaaacagtcctatacctacatcattgaggagaacacta | |
| ccacgagcttcacctgggccttccagaggaccacttttcatgaggcaagcaggaagtaca | |
| ccaatgacgttgccaagatctactccatcaatgtcaccaatgttatgaatggtgtggcct | |
| cctactgccgtccctgtgccctagaagcctctgatgtgggctcctcctgcacctcttgtc | |
| ctgctggttactatattgaccgagattcaggaacctgccactcctgcccccctaacacaa | |
| ttctgaaagcccaccagccttatggtgtccaggcctgtgtgccctgtggtccagggacca | |
| agaacaacaagatccactctctgtgctacaacgattgcaccttctcacgcaacactccaa | |
| ccaggactttcaactacaacttctccgctttggcaaacaccgtcactcttgctggagggc | |
| caagcttcacttccaaagggttgaaatacttccatcactttaccctcagtctctgtggaa | |
| accagggtaggaaaatgtctgtgtgcaccgacaatgtcactgacctccggattcctgagg | |
| gtgagtcagggttctccaaatctatcacagcctacgtctgccaggcagtcatcatccccc | |
| cagaggtgacaggctacaaggccggggtttcctcacagcctgtcagccttgctgatcgac | |
| ttattggggtgacaacagatatgactctggatggaatcacctccccagctgaacttttcc | |
| acctggagtccttgggaataccggacgtgatcttcttttataggtccaatgatgtgaccc | |
| agtcctgcagttctgggagatcaaccaccatccgcgtcaggtgcagtccacagaaaactg | |
| tccctggaagtttgctgctgccaggaacgtgctcagatgggacctgtgatggctgcaact | |
| tccacttcctgtgggagagcgcggctgcttgcccgctctgctcagtggctgactaccatg | |
| ctatcgtcagcagctgtgtggctgggatccagaagactacttacgtgtggcgagaaccca | |
| agctatgctctggtggcatttctctgcctgagcagagagtcaccatctgcaaaaccatag | |
| atttctggctgaaagtgggcatctctgcaggcacctgtactgccatcctgctcaccgtct | |
| tgacctgctacttttggaaaaagaatcaaaaactagagtacaagtactccaagctggtga | |
| tgaatgctactctcaaggactgtgacctgccagcagctgacagctgcgccatcatggaag | |
| gcgaggatgtagaggacgacctcatctttaccagcaagaagtcactctttgggaagatca | |
| aatcatttacctccaagaggactcctgatggatttgactcagtgccgctgaagacatcct | |
| caggaggccccgacatggacctgtgagaggcactgcctgcctcacctgcctcctcacctt | |
| gcatagcacctttgcaagcctgcggcgatttgggtgccagcatcctgcaacacccactgc | |
| tggaaatctcttcattgtggccttatcagatgtttgaatttcagatctttttttatagag | |
| tacccaaaccctcctttctgcttgcctcaaacctgccaaatatacccacactttgtttgt | |
| aaaaaaaaaaaaaaaaaaaaaaaaaaaaaaa | |

[0291] TABLE 170

| | |
|---|---|
| cbe_3753270 gbh_ac004503 | |
| Homo sapiens chromosome 5, P1 clone 1354A7 (LBNL H47), complete | |
| length = 2039 | |
| ccaggggcgcacgggttgggaggcgccaggcggcccgccctccttgcacgggccggccca | SEQ ID NO: 161 |
| gcttccccgcccctggcgtccgctccctcccgctcgcagcttacttaacctggcccgggc | |
| ggcggaggcgctctcacttccctggagccgcccgcttgcccgtcggtcgctagctcgctc | |
| ggtgcgcgtcgtcccgctccatggcgctcttcgtgcggctgctggctctcgccctggctc | |
| tggccctgggccccgccgcgaccctggcgggtcccgccaagtcgccctaccagctggtgc | |
| tgcagcacagcaggctccggggccgccagcacggccccaacgtgtgtgctgtgcagaagg | |
| ttattggcactaataggaagtacttcaccaactgcaagcagtggtaccaaaggaaaatct | |
| gtggcaaatcaacagtcatcatctacgagtgctgtcctggatatgaaaaggtccctgggg | |
| agaagggctgtccagcagccctaccactctcaaacctttacgagaccctgggagtcgttg | |
| gatccaccaccactcagctgtacacggaccgcacggagaagctgaggcctgagatggagg | |
| ggcccggcagcttcaccatcttcgcccctagcaacgaggcctgggcctccttgccagctg | |
| aagtgctggactccctggtcagcaatgtcaacattgagctgctcaatgccctccgctacc | |
| atatggtgggcaggcgagtcctgactgatgagctgaaacacggcatgaccctcacctcta | |
| tgtaccagaattccaacatccagatccaccactatcctaatgggattgtaactgtgaact | |
| gtgcccggctgctgaaagccgaccaccatgcaaccaacggggtggtgcacctcatcgata | |
| aggtcatctccaccatcaccaacaacatccagcagatcattgagatcgaggacacctttg | |
| agacccttcgggctgctgtggctgcatcagggctcaacacgatgcttgaaggtaacggcc | |
| agtacacgcttttggccccgaccaatgaggccttcgagaagatccctagtgagactttga | |
| accgtatcctgggcgacccagaagccctgagagacctgctgaacaaccacatcttgaagt | |
| cagctatgtgtgctgaagccatcgttgcggggctgtctgtagagaccctggagggcacga | |
| cactggaggtgggctgcagcggggacatgctcactatcaacgggaaggcgatcatctcca | |
| ataaagacatcctagccaccaacggggtgatccactacattgatgagctactcatcccag | |
| actcagccaagacactatttgaattggctgcagagtctgatgtgtccacagccattgacc | |
| ttttcagacaagccggcctcggcaatcatctctctggaagtgagcggttgaccctcctgg | |
| ctcccctgaattctgtattcaaagatggaacccctccaattgatgcccatacaaggaatt | |
| tgcttcggaaccacataattaaagaccagctggcctctaagtatctgtaccatggacaga | |
| ccctggaaactctgggcggcaaaaaactgagagtttttgtttatcgtaatagcctctgca | |
| ttgagaacagctgcatcgcggcccacggcaagagggggaggtacgggaccctgttcacga | |
| tggaccgggtgctgacccccccaatggggactgtcatggatgtcctgaagggagacaatc | |
| gctttaggtaattagttccatccccgggtggagcttctgcccagtggtcatgctggagtg | |
| ggatgtggggccccagctatttgtcaagctttcttctaccttggggattcaattaacact | |
| agcagtgcactgctgcgaccttccagacttgggatggggaaaaggcaagggtcgccttga | |
| aagcttacattgggaagaagggttacttctaagagtgtaatcttcacatgcatgggaagc | |
| agggaggggggactacatttttatgactgaagtgcaaggaaaacatcaccctctcattg | |

[0292] TABLE 171

| | |
|---|---|
| cbe_3760926 gbh_al359334 | |
| Homo sapiens EST from clone 628609, 5′ end. | |
| length = 881 | |
| tctagtctgtttgttttccttgtgtgtgttttctgttttcgggttggtctttttgtttgc | SEQ ID NO: 162 |
| tttttctcttttttccccctgtgtggttgcctttgtcttttttctcttttgtgtcgtgtt | |
| ctttgtttttgtttgtgttagaccctcatcaatagatggagacatacagaaatagtcaaa | |
| ccacatctacaaaatgccagtatcaggcggcggcttcgaagccaaagtgatgtttggatg | |
| taaagtgaaatattagttggcggatgaagcagatagtgaggaaagttgagccaataatga | |
| cgtgaagtccgtggaagcctgtggtacaaaaaatgttgagccgtagatgccgtcggaaat | |
| ggtgaagggagactcgaagtactctgaggcttgtaggagggtaaaatagagacccagtaa | |
| aattgtaataagcagtgcttgaattatttggtttcggttgttttctattagactatggtg | |
| agctcaggtgattgatactcctgatgcgagtaatacggatgtgtttaggagtgggacttc | |
| taggggatttagcggggtgatgcctgttgggggccagtgccctcctaattggggggtagg | |
| ggctaggctggagtggtaaaaggctcagaaaaatcctgcgaagaaaaaaacttctgaggt | |
| aataaataggattatcccgtatcgaaggcctttttggacaggtggtgtgtgggtggcctt | |
| ggtatgtgctttctcgtgttacatcgcgccatcattggtatatggttagtgtgttggtta | |
| gtaggcctagtatgaggagcgttatggagtggagtgaaatcacatggctaggccggaggt | |
| cattaggagggctgagagggctcctgttacggggtcatggg | |

[0293] TABLE 172

| | |
|---|---|
| cbe_3764052 MARK4 | |
| MAP/microtubule affinity-regulating kinase 4 | |
| length = 1620 | |
| tgggtcagtgtcacctccaggatacagacagccccccttcagcccagcccagccaggtct | SEQ ID NO: 163 |
| cctacaccgccaccatgccattcggtaacacccacaacaagttcaagctgaattacaagc | |
| ctgaggaggagtaccccgacctcagcaaacataacaaccacatggccaaggtactgaccc | |
| ttgaactctacaagaagctgcgggacaaggagactccatctggcttcactgtagacgatg | |
| tcatccagacaggagtggacaacccaggtcaccccttcatcatgaccgtgggctgcgtgg | |
| ctggtgatgaggagtcctacgaagttttcaaggaactctttgaccccatcatctcggatc | |
| gccacgggggctacaaacccactgacaagcacaagactgacctcaaccatgaaaacctca | |
| agggtggagacgacctggaccctaactacgtgctcagcagccgcgtccgcactggccgca | |
| gcatcaagggctacacgttgcccccacactgctcccgtggcgagcgccgggcggtggaga | |
| agctctctgtggaagctctcaacagcctgacgggcgagttcaaagggaagtactaccctc | |
| tgaagagcatgacggagaaggagcagcagcagctcatcgatgaccacttcctgttcgaca | |
| agcccgtgtccccgctgctgctggcctcaggcatggcccgcgactggcccgacgcccgtg | |
| gcatctggcacaatgacaacaagagcttcctggtgtgggtgaacgaggaggatcacctcc | |
| gggtcatctccatggagaaggggggcaacatgaaggaggttttccgccgcttctgcgtag | |
| ggctgcagaagattgaggagatctttaagaaagctggccaccccttcatgtggaaccagc | |
| acctgggctacgtgctcacctgcccatccaacctgggcactgggctgcgtggaggcgtgc | |
| atgtgaagctggcgcacctgagcaagcaccccaagttcgaggagatcctcacccgcctgc | |
| gtctgcagaagaggggtacaggtggcgtggacacagctgccgtgggctcagtatttgacg | |
| tgtccaacgctgatcggctgggctcgtccgaagtagaacaggtgcagctggtggtggatg | |
| gtgtgaagctcatggtggaaatggagaagaagttggagaaaggccagtccattgacgaca | |
| tgatccccgcccagaagtaggcgcctgcccacctgccaccgactgctggaacccagccag | |
| tgggagggcctggcccaccagagtcctgctccctcactcctcgccccgccccctgtccca | |
| gagtcccacctgggggctctctccacccttctcagagttccagtttcaaccagagttcca | |
| accaatgggctccatcctctggattctggccaatgaaatatctccctggcagggtcctct | |
| tcttttcccagagctccaccccaaccaggagctctagttaatggagagctcccagcacac | |
| tcggagcttgtgctttgtctccacgcaaagcgataaataaaagcattggtggccttaaaa | |
| aaaaaaaaaaaaaaaaaaaaaaaaaaaaaaaaaaaaaaaaaaaaaaaaaaaaaaaaaaaa | |

[0294] TABLE 173

| | |
|---|---|
| cbe_3770440 gbh_af217505 | |
| Homo sapiens uncharacterized bone marrow protein BM028 mRNA, | |
| length = 1725 | |
| cctcaaaagaagaagaaatgtgtcatatatcaatttggggatataagcaaatcctagtca | SEQ ID NO: 164 |
| cagtcgttttctaaaaagtattgttttctggaaaaacctagtttttaagaatgatgccac | |
| agcgaagttctattttaactttttaatttgatttttttttctttgttacagaagaagaca | |
| atgatgaaattaaggattggggacctcatgtaagaatgggaggggtgttccaaaggacat | |
| accaggggtctaggaggagtctaggaaggaagtcctgtgttatatcattctgggagtacc | |
| tattttccatgaggggatgaaatactggagctgttgtagaagaaaaacttctgattttaa | |
| tacattcttagcccaagagggctgtacaaaagggaaacacatgtggactaaaaaagatgc | |
| tgggaaaaaagttgttccatgtagacatgactggcatcagactggaggtgaagttaccat | |
| ttcagtatatgctaaaaactcacttccagaacttagccgagtagaagcaaatagcacatt | |
| gttaaatgtgcatattgtatttgaaggagagaaggaatttgatcaaaatgtgaaattatg | |
| gggtgtgattgatgtaaagcgaagttatgtaactatgactgcaacaaagattgaaatcac | |
| tatgagaaaagctgaaccgatgcagtgggcaagccttgaactgcctgcagctaaaaagca | |
| ggaaaaacaaaaagatgacacaacagattgagtgggagatggaaggaaggctattacatt | |
| atttccgaatttttaatactgtgtgaagtggtggcttgctgcgtgtaatcttttgttttg | |
| ttgttgtgttactgaatgtggcatttcagggttaacattaggttcttaaaagccaaagtc | |
| agtttgtctttttgtgcctctcatctttcttttgtgttatgtaagattgattattcattt | |
| ctccctactggtaggaaccatagttgtgtcctatacttgaagaggctggaaagtagccca | |
| taaccataattgcagtatttctttgtatttctctgttaagcaaagaaatattaaggaaca | |
| ttttttttatgtttttgtattattccataattagtaaagcaagatgaaatgtcaaatttt | |
| aatcagttttttcatgggatttgtgttcttacagtacttgaaaatatttaaggaagagat | |
| gaagctctgcagttttttctatgtgggatgattacttttttaaggaggattaattctgag | |
| gtagtatagtaactaaaggggaatatatgaattgtttaacaaattagaatttgtttacaa | |
| ctacttgaatttttaaattatgtcaaaacttacattacttgccaagcagtatgatgttat | |
| aggaaacataaataagattacagaggtatcaatttggttaaaattcaccattttataaga | |
| ctaagcaataatcttaacaacctctttcctgaatatttaaatgtgtttgtatggtgttat | |
| gactaattgttactgatttagagactaagccctcttaaaacctttagttaaatataaaaa | |
| gaaattatatatatcttgcctccctgatggaaaactatataaaattgtagacttaaaagg | |
| tttgtggaaatacattaggatatcagaaaactaaatatatggagttgctttatgactatt | |
| acatgttaaataaaaatagcttaattgttttggaaaaaaaaaaaa | |

[0295] TABLE 174

| | |
|---|---|
| cbe_3772244 PIGQ | |
| phosphatidylinositol glycan, class Q | |
| length = 2878 | |
| cagcgagcgccgtcgtctgcccgggcccgcccatcggggtccccaaccccatccggaccc | SEQ ID NO: 165 |
| cgccgcccgagcgcgcggccccggaagcacccgcctcccggcatggtgctcaaggccttc | |
| ttccccacgtgctgcgtctcgacggacagcgggctgctggtgggacggtgggtgccggag | |
| cagagcagcgccgtggtcctggcggtcctgcactttcccttcatccccatccaggtcaag | |
| cagctcctggcccaggtgcggcaggccagccaggtgggcgtggccgtgctgggcacctgg | |
| tgccactgccggcaggagcccgaggagagcctgggccgcttcctggagagcctgggtgct | |
| gtcttcccccatgagccctggctgcggctgtgccgggagagaggcggcacgttctggagc | |
| tgcgaggccacccaccggcaagcgcccactgcccccggtgcccctggtgaggaccaggtc | |
| atgctcatcttctatgaccagcgccaggtgttgctgtcacagctacacctgcccaccgtc | |
| ctgcccgaccgccaggctggagccaccactgccagcacggggggcctggctgccgtcttc | |
| gacacggtagcacgcagtgaggtgctcttccgcagtgaccgctttgatgagggccccgtg | |
| cggctgagccactggcagtcggagggcgtggaggccagcatcctcgcggagctggccagg | |
| cgagcctcgggacccatttgcctgctgttggccagcctgctgtcgctggtctcagctgtc | |
| agtgcctgccgagtgttcaagctctggcccctgtccttcctcgggagcaaactctccacg | |
| tgcgaacagctccggcaccggctggagcacctcacgctaatcttcagtacacggaaggcg | |
| gagaaccctgcccagctgatgaggaaggccaacacggtggcctctgtgctgctggacgtg | |
| gccctgggcctcatgctgctgtcctggctccacgggagaagccgcatcgggcatctggcc | |
| gacgccctcgttcctgtggctgaccacgtggccgaggagctccagcatctgctgcagtgg | |
| ctgatgggtgctcccgccgggctcaagatgaaccgtgcactggaccaggtgctgggccgc | |
| ttcttcctctaccacatccacctgtggatcagctacatccacctcatgtcccccttcgtg | |
| gagcacatcctttggcacgtgggcctctcggcctgcctgggcctgacggtggccctgtcc | |
| ctcctctcggacattatcgccctcctcaccttccacatctactgcttttacgtctatgga | |
| gccaggctgtactgcctgaagatccatggcctgtcctcactgtggcgtctgttccggggg | |
| aagaagtggaacgttctgcgccagcgcgtggactcctgttcctatgacctggaccagctg | |
| ttcatcgggactctgctcttcaccatcctgctcttcctcctgcctaccacagccctgtac | |
| tacctggtgttcaccctgctccggctcctggtggtcgccgtgcagggcctgatccatctg | |
| ctcgtggacctcatcaactccctgccgctgtactcactgggtcttcggctctgccggccc | |
| tacaggctggcggataaacccactgccctacagccgcgtggtgcacacctaccgcctccc | |
| cagctgtggctgccaccccaagcactcctggggcgccctgtgccgcaagctgttccttgg | |
| ggagctcatctacccctggaggcagagaggggacaagcaggactgagggaactgctggct | |
| cgcctggcaccaccacacggccacagccagccatctgctctgccagggtggcaccagctc | |
| agctggcgcatgtcctgtgctttgtggacgctgctgtgtgctcctgaacacggcaggccc | |
| tgctatcacaccttgggcttggaggtcattgggagtgagcagatgtgggggtggccagcc | |
| aggctggccgcactccatcactggcactgcctgccttgggacccgcttcccacctgctgc | |
| ggtcaccatggtggcgagcacagcaaccccaggtgtccagagcactgccccatgcccacc | |
| ctgtgtacccaggtccagagggtccgtccaccacagcagccccaggtggagggctggtct | |
| ccctgggggctccccagtggctctgccctggctgtgggggtggagggaccttgccaggat | |
| gaaccccccagtcccaggcaccctctagctccctcagccgaacagcaccctgcatctggg | |
| ggattgaagcagtcgctgacccccgtccccagcgggcccgggccctcactccctgaacca | |
| cacggggtttatttgcggatgttccctggagaggtcgctttgtgaagaaaccatcagcag | |
| gctgtgagcatcgccaggctgctgtgggggcgggagcagcctcagtgtcaagggcccgcc | |
| cactgacccagccgtacctattcgtccacggtgccccgtagcagcaggtcctgcggccaa | |
| atctgtctcccttcatgggcctcccagggaaggaggaagccctgctgtgcagacacctct | |
| gtggccccccaggagtgtgagtggcctggggagggggccgtggcactgaggccgaaagtg | |
| cctgccagacggcacggtctgggtgcgggtgttccctgtgagcccgagtccgcttcagga | |
| ggggagcctgcaggtgccggctggtgaggggatgacgcgctgtgggtgggaggaggcagc | |
| gcccatctcagcagcaccaggactgcctgggactccctggcaacccagcaccggggaagc | |
| cgtcagctgctgtgacaataaaacctgccccgtgtctggaaaaaaaaaaaaaaaaaaa | |

[0296] TABLE 175

| | |
|---|---|
| cbe_3773649 EEF1A1L14 | |
| eukaryotic translation elongation factor 1 alpha 1-like 14 | |
| length = 2106 | |
| gtatacgaaatcataaaatctcatagatgtatcctgagtagggcggggcccgtgaaaccc | SEQ ID NO: 166 |
| tctgaatctgcggccaccacccggtaaggctaaatactaatcagacaccgatagtgaact | |
| agtaccgtgagggaaaggtgaaaagaacccgagaggggagtgaaatagattctgaaacca | |
| tttacttacaagtggtccatttacttacaagtgtcagagcacgttaaagtgtgatggcgt | |
| acatcttgcagtatgggccggcgagttatgttaatatgcaaggttaagcagaaaaaagcg | |
| gagccgtagggaaaccgagtctgaatagggcgactttagtatattggcatatacccgaaa | |
| tcaggtgatctatccatgagcaggttgaagcttaggtaaaactaagtggaggaccgaacc | |
| gtagtacgctaaaaagtgcccggatggacttgtggatagtggtgaaattccaatcgaacc | |
| tggagatagctggttctcttcgaaatagctttagggctagcgtatagtattgtttaatgg | |
| gggtagagcactgaatgtggaatggcggcatctagctgtactgactataatcaaactccg | |
| aataccattaaaattaagctatgcagtcggaacgtggtatcaccattgatatctccttgt | |
| ggaaatttgagaccagcaagtactatgtgactatcattgatgccccaggacacagagact | |
| ttatccaaaacatgattacagggacctctcaggctgactgtgctgtcctgattgttgctg | |
| ctggtgttggtgaatttgaagctggtatctccaagaatgggcagacccgagagcatgccc | |
| ttctggcttacacactgggtgtgaaacaactaattgtcggtgttaacaaaatggattcca | |
| ctgagccaccctacagccagaagagatatgaggaaattgttaaggaagtcagcacttaca | |
| ttaagaaaattggctacaaccccgacacagtagcatttgtgccaatttctggttggaatg | |
| gtgacaacatgctggagccaagtgctaacatgccttggttcaagggatggaaagtcaccc | |
| gtaaggatggcaatgccagtggaaccacgctgcttgaggctctggactgcatcctaccac | |
| caactcgtccaactgacaagcccttgggcctgcctctccaggatgtctacaaaattggtg | |
| gtattggtactgttcctgttggccgagtggagactggtgttctcaaacccggtatggtgg | |
| tcacctttggtccagtcaacgttacaacggaagtaaaatctgtcgaaatgcaccatgaag | |
| ctttgggtgaagctcttcctggggacaatgtgggcttcaatgtcaagaatgtgtctgtca | |
| aggatgttcgtcgtggcaacgttgctggtgacagcaaaaatgacccaccaatggaagcag | |
| ctggcttccctgctcaggtgattatcctgaaccatccaggccaaataagcgccggctatg | |
| cccctgtattggattgccacacggctcacattgcatgcaagtttgctgagctgaaggaaa | |
| agattgatcgccgttctggtaaaaagctggaagatggccctaaattcttgaagtctggtg | |
| atgctgccattgttgatatggttcctggcaagcccatgtgtgttgagagcttctcagact | |
| atccacctttgggctgctttgctgttcgtgatatgagacagacagttgcggtgggtgtca | |
| tcaaagcagtggacaagaaggctgctggagctggcaaggtcaccaagtctgcccagaaag | |
| ctcagaaggctaaatgaatattatccctaatcctcccaccccactcttaatcagtggtgg | |
| aagaccggtctcagaactgtttgtttcaattgccatttaagtttagtagtaaaagactgg | |
| ttaatgataacaatgcatcgtaaaacctttcagaaggaaaggagaatgttttgtggacac | |
| gttggttttcttttttgcgtgtggcagttttagttattagtttttaaaatcagtactttt | |
| taatggaaacaacttgacccccaaatttgtcacagaattttgggacccattaaaaggtta | |
| actggg | |

[0297] TABLE 176

| | |
|---|---|
| cbe_3787129 LOC55828 | |
| zinc finger protein ZNF140-like protein | |
| length = 2978 | |
| ggaggccctgctgaggactccggcaagtgtgggtcgcggcgacggcggggctaaggccct | SEQ ID NO: 167 |
| gggtccgcgcgcggtttgaccacggccggggccttgggcatttcctggccttcctgttga | |
| gccgtgtaaacgcggggtgatgacggcgccgacctcttggcactgttgtgagagcgaagt | |
| gggcgcgagagcagacgccagctacagtttttttgggttatgtcgtcatgaagccggcgc | |
| tttcagttgtgcaaccttgaacaaatgggacactgcccatctctaagataagaacctgga | |
| aaggggactctgttggccattggaaattgcagaataatgtctcaggtgacatttagtgat | |
| gtggctatagacttctctcatgaagagtgggcatgcctagattctgctcagagggactta | |
| tacaaggatgtgatggtccagaattatgagaacctggtctctgtaggtctttccgtaact | |
| aagccatatgtgatcatgttattggaggatggaaaagagccctggatgatggagaaaaaa | |
| ctgtcaaaagcttacccatttcctttatcacactctgttcctgcttctgtgaactttgga | |
| ttctctgctctatttgagcattgttcagaagtcactgaaatatttgagttgtcagaacta | |
| tgtgttttctgggtgcttcatttcttatccaattctcctaattccactgtagaagctttt | |
| tcaagaagtaaaaaaaaaaaaaaaaaaaaaaaaaaaaggcagtgctttgctttcttgata | |
| tatttcagattgggaatcaagatgggaaaacaaggaattatcaacaaagaaggatattta | |
| tatgaagattcaccccaaccagtaacaatggaaaaagttgtaaaacaaagttatgaattt | |
| tcaaattctaataagaatttggaatatacagaatgcgacacatttagaagcacctttcat | |
| tcaaagtctactctttctgaaccacaaaacaattctgctgaagggaattcacacaaatat | |
| gatatattaaagaagaatttatcaaaaaagtcagttataaaaagtgagagaataaatggt | |
| ggaaagaaacttttaaattctaataaaagtggggcagccttcaaccagagcaaatctctt | |
| acccttccccagacttgtaatagagagaaaatctatacatgcagtgaatgtgggaaagcc | |
| tttggcaaacagtcaatcctcagtcgccactggagaattcatacaggagagaagccctat | |
| gaatgtcgtgaatgtgggaagacttttagccatggttcatcccttacacgacatcagata | |
| agccatagtggagagaaaccttacaaatgcattgaatgtgggaaggcctttagccatggc | |
| tcatcacttactaaccatcagagcactcacacgggagagaaaccgtatgaatgtatgaac | |
| tgtggaaagtcttttagtcgtgtgtcccttctcattcagcatctaagaattcatacgcaa | |
| gaaaaacgctatgagtgtcgtatatgtggaaaggccttcattcatagttcgtctctcatt | |
| caccatcagaaaagccatactggagagaagccttatgaatgtagagaatgtgggaaagct | |
| ttctgctgtagctcacaccttactcaacatcaaagaattcacagtatgaagaaaaaatat | |
| gaatgcaacaaatgtctcaaggtctttagtagcttctcatttcttgttcaacatcagagt | |
| attcatactgaagaaaaaccgtttgaagtttagaaatgcaggaaatccttcaaccagctt | |
| gaatcactgaatatgcatttgagaaatcacattagattgaaaccctacgaatgcagtata | |
| tgtgggaaagcctttagtcataggtcgtccctgcttcaacatcacagtattcatactgga | |
| gagaaaccttacgaatgtattaaatgtgggaagaccttcagctgtagttcaaaccttact | |
| gtacatcagagaattcatactggagaaaagccatataaatgtagtgagtgtgggaaagct | |
| tttagcaaaggctcgaatcttactgcccatcaaagagtacataatggagagaaacccaat | |
| agtgtggtaagtgtggaaaagcctttagatcatatgaatccctatacatgtgagaaatct | |
| tacagaagagaagcagtgtttatcacggtaaacttcattcatagatcctcccttatttaa | |
| catcagaaaaatgtatactggggaaaagttgtatgaaggtggtgaacatgggagactttt | |
| agcaatgatgcagatttttttattagagtttatactgtagagaaatcatatgaagtcaat | |
| aaatgtgggaaagcctttgtcagtattaatcccttaattgaccntaagtatactcacact | |
| aggaaaaatctgtgtacatgtagcaaatgtgggaaagactataggcaataggaatctcct | |
| gcaaactcctacaggagaaaagttgtatgaatgtggaaactttagaaattgaaggaattt | |
| ttccagttccaagtgcatcccttattctataggaaataaactggagacaaatctcattta | |
| agagatgcagcaaagtgttcactaagagtgtttatcttgccagacataagaagatgaatg | |
| gtagagcaacctgaaggatttagaaattacatataaatctttgcagttatgctatttgta | |
| aacaggattatataggagagcaaataaacataagtatgcatttcttagagcagtagcttg | |
| cagtttcagttgagttctacttagaaattctttttagctagtgggcatgtgaagatattt | |
| agtcacccagaggagccagtaaatgttataatgttaaaaattaaagctgcaaaagaaata | |
| aaatggtgttaataaaaattttggcatctaataaaatcattttgtatatcaaaaaaaaaa | |
| aaaaaaaaaaaaaaaaaaaaaaaaaaaaaaaaaaaaaa | |

[0298] TABLE 177

| | |
|---|---|
| cbe_3789063 AP2M1 | |
| adaptor-related protein complex 2, mu 1 subunit | |
| length = 1936 | |
| ccgaggcagcgggcagacgagcagggggcgggcggacatcttgggatccggagagtggcc | SEQ ID NO: 168 |
| gggccggcagagcagggggccgaggacaccaggtctgttctcagagcgatgggccgcgga | |
| gactgatctgccgccatgattggaggcttattcatctataatcacaagggggaggtgctc | |
| atctcccgagtctaccgagatgacatcgggaggaacgcagtggatgcctttcgggtcaat | |
| gttatccatgcccggcagcaggtgcgcagccccgtcaccaacattgctcgcaccagcttc | |
| ttccacgttaagcggtccaacatttggctggcagcagtcaccaagcagaatgtcaacgct | |
| gccatggtcttcgaattcctctataagatgtgtgacgtgatggctgcctactttggcaag | |
| atcagcgaggaaaacatcaagaacaattttgtgctcatatatgagctgctggatgagatt | |
| ctagactttggctacccacagaattccgagacaggcgcgctgaaaaccttcatcacgcag | |
| cagggcatcaagagtcagcatcagacaaaagaagagcagtcacagatcaccagccaggta | |
| actgggcagattggctggcggcgagagggtatcaagtatcgtcggaatgagctcttcctg | |
| gatgtgctggagagtgtgaacctgctcatgtccccacaagggcaggtgctgagtgcccat | |
| gtgtcgggccgggtggtgatgaagagctacctgagtggcatgcctgaatgcaagtttggg | |
| atgaatgacaagattgttattgaaaagcagggcaaaggcacagctgatgaaacaagcaag | |
| agcgggaagcaatcaattgccattgatgactgcaccttccaccagtgtgtgcgactcagc | |
| aagtttgactctgaacgcagcatcagctttatcccgccagatggagagtttgagcttatg | |
| aggtatcgcacaaccaaggacatcatccttcccttccgggtgatcccgctagtgcgagaa | |
| gtgggacgcaccaaactggaggtcaaggtggtcatcaagtccaactttaaaccctcactg | |
| ctggctcagaagatcgaggtgaggatcccaaccccactgaacacaagcggggtgcaggtg | |
| atctgcatgaaggggaaggccaagtacaaggccagcgagaatgccatcgtgtggaagatc | |
| aagcgcatggcaggcatgaaggaatcgcagatcagcgcagagattgagcttctgcctacc | |
| aacgacaagaagaaatgggctcgaccccccatttccatgaactttgaggtgccattcgcg | |
| ccctctggcctcaaggtgcgctacttgaaggtgtttgaaccgaagctgaactacagcgac | |
| catgatgtcatcaaatgggtgcgctacattggccgcagtggcatttatgaaactcgctgc | |
| tagctgccactaggcagctagcccacctccccagccaccctcctccacaggtccaggtgc | |
| cgctccctcccccaccacacatcagtgtctcctccctcctgctttgctgccttccctttg | |
| caccagcccgagtctaggtctgggccaagcacattacaagtgggaccggtggagcagccc | |
| ctgggctccctgggcaggggagttctgaggctcctgctctcccatccacctgtctgtcct | |
| ggcctaatgccaggctctgagttctgtgaccaaagccaggtgggttccctttccttccca | |
| cccctgtggccacagctctggagtgggagggttggttgcccctcacctcagagctccccc | |
| aaaggccagtaatggatccccggcctcagtccctactctgctttgggatagtgtgagctt | |
| cattttgtacacgtgtgacttcgtccagttacaaacccaataaactctgtagagtggaaa | |
| aaaaaaaaaaaaaaaa | |

[0299] TABLE 178

| | |
|---|---|
| cbe_3800240 IVD | |
| isovaleryl Coenzyme A dehydrogenase | |
| length = 2216 | |
| tttccgcagttaggggctgctatttcaacgcagggagataaaaagaaaaaaacacttgct | SEQ ID NO: 169 |
| cttctaccccgctaaaaacactcatcctagggagcacgccagcatttgcagcgttcgggg | |
| cagggccactcggcctgcggccgttgcactggctggaagctggcaggcgatcacggttga | |
| ttggctcgggtgcggtccaagggcagcaacgccttcggcgggccgcctagggtgattggc | |
| tgctgcagcccaccccctagccggtttggtgggcggcgaagcctggattggtggagctaa | |
| gagctggctcagtttcagcgctggctcttcgtgcatggcagagatggcgactgcgactcg | |
| gctgctggggtggcgtgtggcgagctggaggctgcggccgccgcttgccggcttcgtttc | |
| ccagcgggcccactcgcttttgcccgtggacgatgcaatcaatgggctaagcgaggagca | |
| gaggcagcttcgtcagaccatggctaagttccttcaggagcacctggcccccaaggccca | |
| ggagatcgatcgcagcaatgagttcaagaacctgcgagaattttggaagcagctggggaa | |
| cctgggcgtattgggcatcacagcccctgttcagtatggcggctccggcctgggctacct | |
| ggagcatgtgctggtgatggaggagatatcccgagcttccggagcagtggggctcagtta | |
| cggtgcccactccaacctctgcatcaaccagcttgtacgcaatgggaatgaggcccagaa | |
| agagaagtatctcccgaagctgatcagtggtgagtacatcggagccctggccatgagtga | |
| gcccaatgcaggctctgatgttgtctctatgaagctcaaagcggaaaagaaaggaaatca | |
| ctacatcctgaatggcaacaagttctggatcactaatggccctgatgctgacgtcctgat | |
| tgtctatgccaagacagatctggctgctgtgccagcttctcggggcatcacagccttcat | |
| tgtggagaagggtatgcctggctttagcacctctaagaagctggacaagctggggatgag | |
| gggctctaacacctgtgagctaatctttgaagactgcaagattcctgctgccaacatcct | |
| gggccatgagaataagggtgtctacgtgctgatgagtgggctggacctggagcggctggt | |
| gctggccggggggcctcttgggctcatgcaagcggtcctggaccacaccattccctacct | |
| gcacgtgagggaagcctttggccagaagatcggccacttccagttgatgcaggggaagat | |
| ggctgacatgtacacccgcctcatggcgtgtcggcagtatgtctacaatgtcgccaaggc | |
| ctgcgatgagggccattgcactgctaaggactgtgcaggtgtgattctttactcagctga | |
| gtgtgctacacaggtagccctggacggcattcagtgttttggtggcaatggctacatcaa | |
| tgactttcccatgggccgctttcttcgagatgccaagctgtatgagataggggctgggac | |
| cagcgaggtgaggcggctggtcatcggcagagccttcaatgcagactttcactagtcctg | |
| agacccttcgcccccttttcctgcacctagtggcctttcttgggaagtagagatgtggcg | |
| gctttcccaccctgcccacagcaggccctcctgcccagctgctcttgtcagccctctggc | |
| ctctggatgaggttgagttctccacaacagctcccaagcatcatgggcctcgcagccggg | |
| cctgtgccacggctagtgttgtgtgatttaaaatggactcagcaggaagcatattgtctg | |
| gggattgttgggacaggttttggtgactctgtgcccttgctctctaacttctgagcccac | |
| ctcccagggtaggcacctgggggcatgcaggtgcccacctcccagggtaggcacctgggg | |
| gcatgcaggtacccacctctttctcttgggtgaggctctggcaaggagatctctctgctc | |
| aagcacagcagaatcatggcccctctccatgaattggaacttggtacaggttaagtatcc | |
| ctaatcctgaaatctgaaacacttgtggttccaagcattttggataaggcaaattcaact | |
| ttcagtctcttttctgggggaaaaaaataataaacctagcctagccaggcgtggtg | |

[0300] TABLE 179

| | |
|---|---|
| cbe_3810032 gbh_af142421 | |
| Homo sapiens QUAKING isoform 5 (QUAKING) mRNA, complete cds. | |
| length = 1497 | |
| ccgggggcttctcagttttattttatcaatctatatgcatatccttatgccagtctcaca | SEQ ID NO: 170 |
| cagtgttaattactgtagctttgtagtcagttttgaaatcaagaagtatgagtccttcgt | |
| tcttatttttcaaaattatcttggctgttctgtgtcccgtgtgtttctagataaatttta | |
| ggatcatcttgtcaatttctggggatattggctgggttcttggtttacttccatgtgttc | |
| tctttaaatggctagactgggctttggttttttcagtatcgggttggaatctgagagggg | |
| aaatggaaacgaaggagaagccgaagcccaccccagattacctgatgcagctgatgaacg | |
| acaagaagctcatgagcagcctgcccaacttctgcgggatcttcaaccacctcgagcggc | |
| tgctggacgaagaaattagcagagtacggaaagacatgtacaatgacacattaaatggca | |
| gtacagagaaaaggagtgcagaattgcctgatgctgtgggacctattgttcagttacaag | |
| agaaactttatgtgcctgtaaaagaatacccagattttaattttgttgggagaatccttg | |
| gacctagaggacttacagccaaacaacttgaagcagaaaccggatgtaaaatcatggtcc | |
| gaggcaaaggctcaatgagggataaaaaaaaggaggagcaaaatagaggcaagcccaatt | |
| gggagcatctaaatgaagatttacatgtactaatcactttggaagatgctcagaacagag | |
| cagaaatcaaattgaagagagcagttgaagaagtgaagaaattattggtacctgcagcag | |
| aaggagaagacagcctgaagaagatgcagctgatggagcttgcgattctgaatggcacct | |
| acagagatgccgacattaaatcaccagcccttgccttttctcttgcagcaacagcccagg | |
| ctgctccaaggatcattactgggcctgcgccggttctcccaccagctgccctgcgtactc | |
| ctacgccagctggccctaccataatgcctttgatcagacaaatacagaccgctgtcatgc | |
| caaacggaactcctcacccaactgctgcaatagttcctccagggcccgaagctggtttaa | |
| tctatacaccctatgagtacccctacacattggcaccagctacatcaatccttgagtatc | |
| ctattgaacctagtggtgtattaggtgcggtggctactaaagttcgaaggcacgatatgc | |
| gtgtccatccttaccaaaggattgtgaccgcagaccgagccgccaccggcaactaaccta | |
| tgaccttctgacctctgaactcttcacccaatgatgacctgaccatgcctgcctgctgat | |
| cagttaactggtaatcgcctttgcttgcctgtcgtcagtgcagcgagctgaggcacttgt | |
| ccgttcgtcttaccatctaaccaaacaaaagacaaagaaattgttgtcctccaactc | |

[0301] TABLE 180

| | |
|---|---|
| cbe_3810791 EPHB1 | |
| EphB1 | |
| length = 3865 | |
| cacatgcacacccacacccacgcgcgcccgcaccgccccacgcgcacacactcctgccca | SEQ ID NO: 171 |
| cgcccacgcagcgctccgggaagtccggtccgggcgagagcgcgaaaggataccgagaag | |
| ccacccgcggagagcgcagcggcgccctgggacgcggcgctctcccggcgctgctgcctc | |
| ggcttggtctcggcctgcgggccgtcggccggcgatggccctggattatctactactgct | |
| cctcctggcatccgcagtggctgcgatggaagaaacgttaatggacaccagaacggctac | |
| tgcagagctgggctggacggccaatcctgcgtccgggtgggaagaagtcagtggctacga | |
| tgaaaacctgaacaccatccgcacctaccaggtgtgcaatgtcttcgagcccaaccagaa | |
| caattggctgctcaccaccttcatcaaccggcggggggcccatcgcatctacacagagat | |
| gcgcttcactgtgagagactgcagcagcctccctaatgtcccaggatcctgcaaggagac | |
| cttcaacttgtattactatgagactgactctgtcattgccaccaagaagtcagccttctg | |
| gtctgaggccccctacctcaaagtagacaccattgctgcagatgagagcttctcccaggt | |
| ggactttgggggaaggctgatgaaggtaaacacagaagtcaggagctttgggcctcttac | |
| tcggaatggtttttacctcgcttttcaggattatggagcctgtatgtctcttctttctgt | |
| ccgtgtcttcttcaaaaagtgtcccagcattgtgcaaaattttgcagtgtttccagagac | |
| tatgacaggggcagagagcacatctctggtgattgctcggggcacatgcatccccaacgc | |
| agaggaagtggacgtgcccatcaaactctactgcaacggggatggggaatggatggtgcc | |
| tattgggcgatgcacctgcaagcctggctatgagcctgagaacagcgtggcatgcaaggc | |
| ttgccctgcagggacattcaaggccagccaggaagctgaaggctgctcccactgcccctc | |
| caacagccgctcccctgcagaggcgtctcccatctgcacctgtcggaccggttattaccg | |
| agcggactttgaccctccagaagtggcatgcactagcgtcccatcaggtccccgcaatgt | |
| tatctccatcgtcaatgagacgtccatcattctggagtggcaccctccaagggagacagg | |
| tgggcgggatgatgtgacctacaacatcatctgcaaaaagtgccgggcagaccgccggag | |
| ctgctcccgctgtgacgacaatgtggagtttgtgcccaggcagctgggcctgacggagtg | |
| ccgcgtctccatcagcagcctgtgggcccacaccccctacacctttgacatccaggccat | |
| caatggagtctccagcaagagtcccttccccccacagcacgtctctgtcaacatcaccac | |
| aaaccaagccgccccctccaccgttcccatcatgcaccaagtcagtgccactatgaggag | |
| catcaccttgtcatggccacagccggagcagcccaatggcatcatcctggactatgagat | |
| ccggtactatgagaaggaacacaatgagttcaactcctccatggccaggagtcagaccaa | |
| cacagcaaggattgatgggctgcggcctggcatggtatatgtggtacaggtgcgtgcccg | |
| cactgttgctggctacggcaagttcagtggcaagatgtgcttccagactctgactgacga | |
| tgattacaagtcagagctgagggagcagctgcccctgattgctggctcggcagcggccgg | |
| ggtcgtgttcgttgtgtccttggtggccatctctatcgtctgtagcaggaaacgggctta | |
| tagcaaagaggctgtgtacagcgataagctccagcattacagcacaggccgaggctcccc | |
| agggatgaagatctacattgaccccttcacttatgaggatcccaacgaagctgtccggga | |
| gtttgccaaggagattgatgtatcttttgtgaaaattgaagaggtcatcggagcagggga | |
| gtttggagaagtgtacaaggggcgtttgaaactgccaggcaagagggaaatctacgtggc | |
| catcaagaccctgaaggcagggtactcggagaagcagcgtcgggactttctgagtgaggc | |
| gagcatcatgggccagttcgaccatcctaacatcattcgcctggagggtgtggtcaccaa | |
| gagtcggcctgtcatgatcatcacagagttcatggagaatggtgcattggattctttcct | |
| caggcaaaatgacgggcagttcaccgtgatccagcttgtgggtatgctcaggggcatcgc | |
| tgctggcatgaagtacctggctgagatgaattatgtgcatcgggacctggctgctaggaa | |
| cattctggtcaacagtaacctggtgtgcaaggtgtccgactttggcctctcccgctacct | |
| ccaggatgacacctcagatcccacctacaccagctccttgggagggaagatccctgtgag | |
| atggacagctccagaggccatcgcctaccgcaagttcacttcagccagcgacgtttggag | |
| ctatgggatcgtcatgtgggaagtcatgtcatttggagagagaccctattgggatatgtc | |
| caaccaagatgtcatcaatgccatcgagcaggactaccggctgcccccacccatggactg | |
| tccagctgctctacaccagctcatgctggactgttggcagaaggaccggaacagccggcc | |
| ccggtttgcggagattgtcaacaccctagataagatgatccggaacccggcaagtctcaa | |
| gactgtggcaaccatcaccgccgtgccttcccagcccctgctcgaccgctccatcccaga | |
| cttcacggcctttaccaccgtggatgactggctcagcgccatcaaaatggtccagtacag | |
| ggacagcttcctcactgctggcttcacctccctccagctggtcacccagatgacatcaga | |
| agacctcctgagaataggcatcaccttggcaggccatcagaagaagatcctgaacagcat | |
| tcattctatgagggtccagataagtcagtcaccaacggcaatggcatgagaactcttgtt | |
| tcttggggaaggagaggagggaaaaggaccagggtcaagggggaccagaggttgaccact | |
| gtggaatgtactggagagactggcttctcagctgaggaatgcatttccatcagtgaagaa | |
| tcaaccggacctgttgctagcaggcaatctccatttctcagtgacagaagcatgtttgag | |
| atgccgtgggaaaccaaatatataataataaaaatataaaaaggtgatgttcaacagaag | |
| tgaagacaaaacaatatgcatcaggagaacaagagtaaacccagctcccactctcagtgg | |
| gctgcagttgcccaaccacaggaagaaagggaaggaggtagagggaagaaacagaagcag | |
| tgttccattttcttcctcaccaatgacattcttttcttttctcctttcgtactcctccct | |
| gagagtcccctcccttctcccacactcgtttccctttgctcatgactcctgtagggaagt | |
| ttcttcaaacaaaacccagctcctgagtctccagatgttgttctgtcagttgccaaagga | |
| ctttgctgaccactgcatggggatccaaccaattcaattaatgtcttcatattgaagaag | |
| agatgtaccttcaattgaaaacctcgtttttcttttgtttgcattttctgcaaaaaggaa | |
| aaagaaaccacaaattggggaattc | |

[0302] TABLE 181

| | |
|---|---|
| cbe_3820530 PGAM1 | |
| phosphoglycerate mutase 1 (brain) | |
| length = 1709 | |
| gggcggggtgccgcatccccagcccgccgccatggccgcctacaaactggtgctgatccg | SEQ ID NO: 172 |
| gcacggcgagagcgcatggaacctggagaaccgcttcagcggctggtacgacgccgacct | |
| gagcccggcgggccacgaggaggcgaagcgcggcgggcaggcgctacgagatgctggcta | |
| tgagtttgacatctgcttcacctcagtgcagaagagagcgatccggaccctctggacagt | |
| gctagatgccattgatcagatgtggctgccagtggtgaggacttggcgcctcaatgagcg | |
| gcactatgggggtctaaccggtctcaataaagcagaaactgctgcaaagcatggtgaggc | |
| ccaggtgaagatctggaggcgctcctatgatgtcccaccacctccgatggagcccgacca | |
| tcctttctacagcaacatcagtaaggatcgcaggtatgcagacctcacagaagatcagct | |
| accctcctgtgagagtctgaaggatactattgccagagctctgcccttctggaatgaaga | |
| aatagttccccagatcaaggaggggaaacgtgtactgattgcagcccatggcaacagcct | |
| ccggggcattgtcaagcatctggagggtctctctgaagaggctatcatggagctgaacct | |
| gccgactggtattcccattgtctatgaattggacaagaacttgaagcctatcaagcccat | |
| gcagtttctgggggatgaagagacggtgcgcaaagccatggaagctgtggctgcccaggg | |
| caaggccaagaagtgaaggccggcggggaggatactgtccccaggagcaccctccctgcc | |
| cgtcttgtccctctgcccctcccacctgcacatgtcacactgaccacatctgtagacatc | |
| ttgagttgtagctgcagacggggaccagtggctcccattttcattttagccattttgtcg | |
| cctgcacccactcccttcatacaatctagtcagaatagcagttctagagcacaggttctc | |
| agtctaagctatggaaaagctccccttatccaacagagtttaaaagtagtgacttgggtt | |
| tttgcgagtgctttgtttactaaggactttggggaggaaccatgctaagccatgaccagt | |
| gaggagaagcaacagagcctgtctgtccccatgagcggagtctgtcctctgctcttctgc | |
| agtcaggtcactgcctactgcctgggggctctagtcattccagtggaagacgaatgtaac | |
| ctgcgtggtgatgtgacaactgtttcctccctgaccccagaggatctggctctaggttgg | |
| gatcaatcctgaatttcgttatgtgttaatttacttttattaaaaaagtatagtatatat | |
| aatacaaaacaataacccttctggggtttcttgtggcggttgaaatagtcccacatgtgg | |
| tcatcagaaatagcattcctcataccaatataggatcagctccttgacctctgaggggtc | |
| aggagtgcttcctggtgtgtgtattagaatcccttcctgccttgtttcatggcagtgaaa | |
| tgcctcttggtcctgtccagtgtatctttcactgatttctgaatcatgttctagttgctt | |
| gaccctgccacatgggtccagtgttcatctgagcataactgtactaaatcctttttccat | |
| atcagtataataaaggagtgatgtgcaat | |

[0303] TABLE 182

| | |
|---|---|
| cbe_3825897 POLR2L | |
| polymerase (RNA) II (DNA directed) polypeptide L, 7.6 kDa | |
| length = 392 | |
| agtctgggacgcgccgccgccatgatcatccctgtacgctgcttcacttgtggcaagatc | SEQ ID NO: 173 |
| gtcggcaacaagtgggaggcttacctggggctgctgcaggccgagtacaccgagggggac | |
| gcgctggatgccctgggcctgaagcgctactgctgccgccggatgctgctggcccacgtg | |
| gacctgatcgagaagctgctcaattatgcacccctggagaagtgaccacgctgaaaccca | |
| cccacccgctgtgctgaccatgggccctgagcgtcctaccccgaattcacgaggctgagg | |
| catccgggagctggcgtaatgcctggccgcagtgtgtgtgtatcccataccccactctgg | |
| aaggaaccatccagtaaaggtctttcagaacc | |

[0304] TABLE 183

| | |
|---|---|
| cbe_3826540 NYD-TSP1 | |
| testis-specific protein NYD-TSP1 | |
| length = 1880 | |
| ctttcccacccttcctccccacaaggctgtctgagatgccaccttccacctaaacatcat | SEQ ID NO: 174 |
| ctcccaaattttaatccttaactttggtctctgacttctgcttgattccacagtctccac | |
| ccacatttgcacaaaggaccatcacctgtccttcctggaatctctaaagttttctgcttt | |
| ccttctgtcctgatggccagctctgctaagtcagctgagatgcccaccatctccaaaacc | |
| cttaaccctactcctgatcctcatcaagaatatctggaccctaggattaccattgcctta | |
| ttcgaaattggatcacattccccttcctcctggggctctctccctttcctaaagaatagc | |
| agccatcaagttacagaacaacagactgcacagaagtttaacaatctcttaaaagaaatt | |
| aaagatattcttaaaaatatggcaggttttgaagagaagatcacagaagcaaaagaactt | |
| tttgaggaaaccaatattactgaggatgtgtcagcccacaaagaaaatatcagaggactt | |
| gacaaaatcaatgaaatgttatcaacaaacctgcctgttagtttagccccagagaaagaa | |
| gacaatgaaaagaaacaggagatgatattggaaaccaatattactgaggatgtgtcagcc | |
| cacaaagaaaatatcagaggacttgacaaaatcaatgaaatgttatcaacaaacctgcct | |
| gttagtttagccccagagaaagaagacaatgaaaagaaacagcagatgataatggaaaac | |
| cagaactctgagaacaccgcacaagtttttgcaagagatttggtaaatcgtttagaagaa | |
| aaaaaagtccttaacgaaactcaacaaagtcaggaaaaagcaaaaaacagacttaatgtt | |
| caagaagaaactatgaaaattaggaacaacatggagcagttactacaggaagcagaacac | |
| tggagtaaacaacatactgagctcagtaaactgataaaatcctatcagaaatctcagaaa | |
| gacataagtgaaactcttggaaataatggagtcggtttccaaacccagccaaataatgaa | |
| gtgtcggctaagcatgagctggaggaacaggtgaagaaactgagccatgacacctattca | |
| ttgcagttgatggcagctttgctagagaatgaatgccaaatcttacagcagagagtagag | |
| attctcaaggaactccatcatcagaaacagggaactctgcaagagaagccaattcagata | |
| aactataaacaggacaagaaaaatcagaagccatcagaagcaaagaaagtagaaatgtat | |
| aagcagaacaagcaagcaatgaagggtacattttggaaaaaagacagatcctgtagaagc | |
| ctggatgtttgtcttaataagaaagcttgcaatacccagttcaatattcatgttgcaaga | |
| aaagctcttaggggaaaaatgaggtcagctagcagcctaagatagaaaataccaaaagca | |
| gatgaaaaggtgaatccttaaaaaactacatctgttacctccaacttgtcagtcatgatc | |
| aatcatcaaaccttgggcagatctgctggttcaaccaagaaagagctatagaataaggag | |
| attgacacttatattactcattacttcagcagttatgtaagtctggtctttaatgaccat | |
| tgtgtctacatcaagttcataacttttcacctttacaatctgcttgttttttttgtaatt | |
| attagatagacagcctagagtgagaagttaaaggtccaattaagttaagatctaaataaa | |
| aaccagaatacaagggaaaaaaaaaaaaaaaaaaaaaaaaaaaaaaaaaaaaaaaaaaaa | |
| aaaaaaaaaaaaaaaaaaaa | |

[0305] TABLE 184

| | |
|---|---|
| cbe_3833533 TRIM29 | |
| tripartite motif-containing 29 | |
| length = 3018 | |
| ctcctcacaggtgtgtctctagtcctcgtggttgcctgccccactccctgccgagacgcc | SEQ ID NO: 175 |
| tgccagaaaggtcacctatcctgaaccccagcaagcctgaaacagctcagccaagcaccc | |
| tgcgatggaagctgcagatgcctccaggagcaacgggtcgagcccagaagccagggatgc | |
| ccggagcccgtcgggccccagtggcagcctggagaatggcaccaaggctgacggcaagga | |
| tgccaagaccaccaacgggcacggcggggaggcagctgagggcaagagcctgggcagcgc | |
| cctgaagccaggggaaggtaggagcgccctgttcgcgggcaatgagtggcggcgacccat | |
| catccagtttgtcgagtccggggacgacaagaactccaactacttcagcatggactctat | |
| ggaaggcaagaggtcgccgtacgcagggctccagctgggggctgccaagaagccacccgt | |
| tacctttgccgaaaagggcgagctgcgcaagtccattttctcggagtcccggaagcccac | |
| ggtgtccatcatggagcccggggagacccggcggaacagctacccccgggccgacacggg | |
| ccttttttcacggtccaagtccggctccgaggaggtgctgtgcgactcctgcatcggcaa | |
| caagcagaaggcggtcaagtcctgcctggtgtgccaggcctccttctgcgagctgcatct | |
| caagccccacctggagggcgccgccttccgagaccaccagctgctcgagcccatccggga | |
| ctttgaggcccgcaagtgtcccgtgcatggcaagacgatggagctcttctgccagaccga | |
| ccagacctgcatctgctacctttgcatgttccaggagcacaagaatcatagcaccgtgac | |
| agtggaggaggccaaggccgagaaggagacggagctgtcactgcaaaaggagcagctgca | |
| gctcaagatcattgagattgaggatgaagctgagaagtggcagaaggagaaggaccgcat | |
| caagagcttcaccaccaatgagaaggccatcctggagcagaacttccgggacctggtgcg | |
| ggacctggagaagcaaaaggaggaagtgagggctgcgctggagcagcgggagcaggatgc | |
| tgtggaccaagtgaaggtgatcatggatgctctggatgagagagccaaggtgctgcatga | |
| ggacaagcagacccgggagcagctgcatagcatcagcgactctgtgttgtttctgcagga | |
| atttggtgcattgatgagcaattactctctccccccacccctgcccacctatcatgtcct | |
| gctggagggggagggcctgggacagtcactaggcaacttcaaggacgacctgctcaatgt | |
| atgcatgcgccacgttgagaagatgtgcaaggcggacctgagccgtaacttcattgagag | |
| gaaccacatggagaacggtggtgaccatcgctatgtgaacaactacacgaacagcttcgg | |
| gggtgagtggagtgcaccggacaccatgaagagatactccatgtacctgacacccaaagg | |
| tggggtccggacatcataccagccctcgtctcctggccgcttcaccaaggagaccaccca | |
| gaagaatttcaacaatctctatggcaccaaaggtaactacacctcccgggtctgggagta | |
| ctcctccagcattcagaactctgacaatgacctgcccgtcgtccaaggcagctcctcctt | |
| ctccctgaaaggctatccctccctcatgcggagccaaagccccaaggcccagccccagac | |
| ttggaaatctggcaagcagactatgctgtctcactaccggccattctacgtcaacaaagg | |
| caacgggattgggtccaacgaagccccatgagctcctggcggaaggaacgaggcgccaca | |
| cccctgctcttcctcctgaccctgctgctcttgccttctaagctactgtgcttgtctggg | |
| tgggagggagcctggtcctgcacctgccctctgcagccctctgccagcctcttgggggca | |
| gttccggcctctccgacttccccactggccacactccattcagactcctttcctgccttg | |
| tgacctcagatggtcaccatcattcctgtgctcagaggccaacccatcacaggggtgaga | |
| taggttggggcctgccctaacccgccagcctcctcctctcgggctggatctgggggctag | |
| cagtgagtacccgcatggtatcagcctgcctctcccgcccacgccctgctgtctccaggc | |
| ctatagacgtttctctccaaggccctatcccccaatgttgtcagcagatgcctggacagc | |
| acagccacccatctcccattcacatggcccacctcctgcttcccagaggactggccctac | |
| gtgctctctctcgtcctacctatcaatgcccagcatggcagaacctgcagcccttggcca | |
| ctgcagatggaaacctctcagtgtcttgacatcaccctacccaggcggtgggtctccacc | |
| acagccactttgagtctgtggtccctggagggtggcttctcctgactggcaggatgacct | |
| tagccaagatattcctctgttccctctgctgagataaagaattcccttaacatgatataa | |
| tccacccatgcaaatagctactggcccagctaccatttaccatttgcctacagaatttca | |
| ttcagtctacactttggcattctctctggcgatggagtgtggctgggctgaccgcaaaag | |
| gtgccttacacactgcccccaccctcagccgttgccccatcagaggctgcctcctccttc | |
| tgattaccccccatgttgcatatcagggtgctcaaggattggagaggagacaaaaccagg | |
| agcagcacagtggggacatctcccgtctcaacagccccaggcctatgggggctctggaag | |
| gatgggccagcttgcaggggttggggagggagacatccagcttgggctttcccctttgga | |
| ataaaccattggtctgtc | |

[0306] TABLE 185

| | |
|---|---|
| cbe_3834015 TFPI | |
| tissue factor pathway inhibitor (lipoprotein-associated coagulation inhibitor) | |
| length = 915 | |
| atgatttacacaatgaagaaagtacatgcactttgggcttctgtatgcctgctgcttaat | SEQ ID NO: 176 |
| cttgcccctgcccctcttaatgctgattctgaggaagatgaagaacacacaattatcaca | |
| gatacggagttgccaccactgaaacttatgcattcattttgtgcattcaaggcggatgat | |
| ggcccatgtaaagcaatcatgaaaagatttttcttcaatattttcactcgacagtgcgaa | |
| gaatttatatatgggggatgtgaaggaaatcagaatcgatttgaaagtctggaagagtgc | |
| aaaaaaatgtgtacaagagataatgcaaacaggattataaagacaacattgcaacaagaa | |
| aagccagatttctgctttttggaagaagatcctggaatatgtcgaggttatattaccagg | |
| tatttttataacaatcagacaaaacagtgtgaacgtttcaagtatggtggatgcctgggc | |
| aatatgaacaattttgagacactggaagaatgcaagaacatttgtgaagatggtccgaat | |
| ggtttccaggtggataattatggaacccagctcaatgctgtgaataactccctgactccg | |
| caatcaaccaaggttcccagcctttttgaatttcacggtccctcatggtgtctcactcca | |
| gcagacagaggattgtgtcgtgccaatgagaacagattctactacaattcagtcattggg | |
| aaatgccgcccatttaagtacagtggatgtgggggaaatgaaaacaattttacttccaaa | |
| caagaatgtctgagggcatgtaaaaaaggtttcatccaaagaatatcaaaaggaggccta | |
| attaaaaccaaaagaaaaagaaagaagcagagagtgaaaatagcatatgaagaaattttt | |
| gttaaaaatatgtga | |

[0307] TABLE 186

| | |
|---|---|
| cbe_3842044 PSMB3 | |
| proteosome (prosome, macropain) subunit, beta type, 3 | |
| length = 784 | |
| gagcggttgcgcagtgaaggctagacccggtttactggaattgctctggcgatcgagggg | SEQ ID NO: 177 |
| tcctagtacaccgcaatcatgtctattatgtcctataacggaggggccgtcatggccatg | |
| aaggggaagaactgtgtggccatcgctgcagacaggcgcttcgggatccaggcccagatg | |
| gtgaccacggacttccagaagatctttcccatgggtgaccggctgtacatcggtctggcc | |
| gggctcgccactgacgtccagacagttgcccagcgcctcaagttccggctgaacctgtat | |
| gagttgaaggaaggtcggcagatcaaaccttataccctcatgagcatggtggccaacctc | |
| ttgtatgagaaacggtttggcccttactacactgagccagtcattgccgggttggacccg | |
| aagacctttaagcccttcatttgctctctagacctcatcggctgccccatggtgactgat | |
| gactttgtggtcagtggcacctgcgccgaacaaatgtacggaatgtgtgagtccctctgg | |
| gagcccaacatggatccggatcacctgtttgaaaccatctcccaagccatgctgaatgct | |
| gtggaccgggatgcagtgtcaggcatgggagtcattgtccacatcatcgagaaggacaaa | |
| atcaccaccaggacactgaaggcccgaatggactaaccctgttcccagagcccacttttt | |
| tttctttttttgaaataaaatagcctgtctttcaaaaaaaaaaaaaaaaaaaaaaaaaaa | |
| aaaa | |

[0308] TABLE 187

| | |
|---|---|
| cbe_3845697 Hs. 191063 | |
| Human DNA sequence from clone RP1-63M2 on chromosome 20 Contains the gene for | |
| CBFA2T2 (core-binding factor, runt domain, alpha subunit 2; translocated to, | |
| 2), part of a gene for a protein similar to ACTIN, the E2F1 (E2F transcription | |
| factor 1) gene, a nov | |
| length = 532 | |
| tttggcatggacacaagtggggcatcacctttattgccataaagtagggccctgtgggta | SEQ ID NO: 178 |
| ggcagctggactggcattctctgaactggcagtggttggggagattcaaactgcagttca | |
| aaatgagggtcccatgggtcccaaataccttctcctggcccagaaagggtatgggggtga | |
| cccatccagtcagctccaacctccaggaggaccctgccagctccaaacacttgactcttt | |
| agatagagagctgtcccccaacgcagtgccaccccccccagtccagcctgactcagttga | |
| acacatcgtacagcagcctggagccacactcctggtacatggcccgagttatccagcggc | |
| gctggaaggagtgcagggaggccaccatggagccgccggtccacacagccatgccacgcc | |
| catgcttggccaccaggtggggccgcagggccgcgtagccgtgccgccggcactgcgcct | |
| ncagctccttgtccaggcgctcggcgaagccaggaaacagtgtggagccgcc | |

[0309] TABLE 188

| | |
|---|---|
| cbe_3849002 CKLF1 | |
| chemokine-like factor 1 | |
| length = 689 | |
| gcaagagagcgggaagccgagctgggcgagaagtaggggagggcggtgctccgccgcggt | SEQ ID NO: 179 |
| ggcggttgctatcgcttcgcagaacctactcaggcagccagctgagaagagttgagggaa | |
| agtgctgctgctgggtctgcagacgcgatggataacgtgcagccgaaaataaaacatcgc | |
| cccttctgcttcagtgtgaaaggccacgtgaagatgctgcggctggcactaactgtgaca | |
| tctatgaccttttttatcatcgcacaagcccctgaaccatatattgttatcactggattt | |
| gaagtcaccgttatcttatttttcatacttttatatgtactcagacttgatcgattaatg | |
| aagtggttattttggcctttgcttgatattatcaactcactggtaacaacagtattcatg | |
| ctcatcgtatctgtgttggcactgataccagaaaccacaacattgacagttggtggaggg | |
| gtgtttgcacttgtgacagcagtatgctgtcttgccgacggggcccttatttaccggaag | |
| cttctgttcaatcccagcggtccttaccagaaaaagcctgtgcatgaaaaaaaagaagtt | |
| ttgtaattttatattactttttagtttgatactaagtattaaacatatttctgtattctt | |
| ccaaaaaaaaaaaaaaaaaaaaaaaaaaa | |

[0310] TABLE 189

| | |
|---|---|
| cbe_3880186 FLJ20343 | |
| hypothetical protein FLJ20343 | |
| length = 2784 | |
| gatgccccgcccgcgcccatggcgcagccacacacgacctcggtcccgtacttcgcgcgc | SEQ ID NO: 180 |
| tctcctgcaccgccgccgccatctcgctcaggagctcctccacaaccgccggcaacacta | |
| cggccatcgcgccgcaggacacgccctccacgaccggcggaccgccgcgacgctccagct | |
| gactgcgcctacctgtggaggatcctgaccccccgccggggcagggcgagacggagtgac | |
| gtcggggcgcgtcatcgcgcgtgcggacgcagggatgtcctgctcagtcgtcagggcccg | |
| gccaatccggagggcgctcggcgcgtggtcgggggccaggagcgcgtctggcctgcagtg | |
| cgcagaggacgcggcgggagcatgttccggctcctgagctggagcctgggccgaggcttc | |
| ctgcgggccgcggggcggcggtgccggggctgctccgcgcgcctgctcccggggctggca | |
| ggaggtccggggcccgaggtgcaggtgccgccatcccgagtcgcgccgcacggccggggc | |
| ccaggcctgctgccgctgctggcagcgctcgcctggttctcgaggcccgctgcggcagag | |
| gaggaggagcagcagggagccgacggggccgctgccgaggacggggcggacgaggccgag | |
| gcagagatcatccagctgctgaagcgagccaagttgagcattatgaaagatgagccagaa | |
| gaggctgagttaattttgcatgacgctcttcgtctcgcctatcagactgataacaagaag | |
| gccatcacttacacttatgatttgatggccaacttagcatttatacggggtcagcttgaa | |
| aatgctgaacaactttttaaagcaacaatgagttacctccttggagggggcatgaagcag | |
| gaggacaatgcaataattgaaatttccctaaagctggccagtatctatgctgcgcagaac | |
| agacaggaatttgctgttgctggctatgaattctgcatttcaactctagaggaaaaaatt | |
| gaaagagaaaaggaattagcagaagacattatgtcagtggaagagaaagccaatacccac | |
| ctcctcttgggcatgtgcttagacgcctgtgctcgctaccttctgttctccaagcagccg | |
| tcacaggcacaaaggatgtatgaaaaagctctgcagatttctgaagaaatacaaggagaa | |
| agacacccacagaccattgtgctgatgagtgacctggctactaccctggatgcacagggc | |
| cgctttgatgaggcctatatttatatgcaaagggcatcagatctggcaagacagataaat | |
| catcctgagctacacatggtactcagtaatctagctgcagttttgatgcacagagaacga | |
| tatacacaagcaaaagagatctaccaggaagcactgaagcaagcaaagctgaaaaaagat | |
| gaaatttctgtacaacacatcagggaagagttggctgagctgtcaaagaaaagtagacct | |
| ttgacaaattctgtcaagctctaaatccatttttgtgtagggagaataatgtctagtaat | |
| gtggaagaatagctatcattcctgtctctgtggcacccgatcaatggcttaaatctgtcg | |
| tttttgatattcaggtttcctcaatttagccttagtgaaggaggggttgtacacactgcc | |
| atttttgtattttaaaggaaaaatgactttcattcccaactgattatgacctttcaggat | |
| gtcgtcaagtgatgctttcagttgtaacacgtgacttggtgctgtccctgctggtctaag | |
| tagaactgtagattcatatgggctggtgttcctgtgcgctgtgggtgtggtgattcagcc | |
| tggcatttctaccataagtttttggtctgctgatttgctgccctgtcttctcttacttta | |
| ctttatcaatacctggcaaactgaccagaattaccttcctcatggcgaagggggattatg | |
| gtgaattgttgttcttatagtctgtttcatgaagcacaagtggaatttaatacataaaag | |
| agaaaaatatcttagtttgctaccagcatccagcatgaagttgtaaagtggggattaggc | |
| acgtgacagtatagcacccatttgaatttaaataaaagtgaaccatatttatctggttat | |
| ataaaactaaaaatgggggtgtttatataaaactaaaaactaagaatgatgtaacctttt | |
| gtctgtgttatctgaacactctacttcctttgcagccttagtcacacaactgagtcatct | |
| caagtactctttaaggacacacagcccaggctgttctgagtcagaataggcccctacagg | |
| tatattttaaaactcttcgtaattctaatgtgtactgctggtatagctgaactactgacc | |
| tggatcttagtcctagcctttttgcttttgcaatttcagtatcttcatctctaaactagg | |
| gaaacactgggattctttcttagctgtgggggaaggtatttggttagatgactttgaatg | |
| aatagactgctgtgctgaaagagctttatcacactgtctcaaagtatgtaaagatacata | |
| ggtggatgctcttactgcagcagtcatgaatacatttttagccatttacctaaggaaaaa | |
| gacagtttttctaggtaccatgaaggaagattgaccctgttggtatgcctgtgggggtgg | |
| gatgtgagtgggactgataaactgatacttttggttcgtatgtacatactggaagaatct | |
| tcataataaatgagactacacaac | |

[0311] TABLE 190

| | |
|---|---|
| cbe_3884811 RCP | |
| Rab coupling protein | |
| length = 2112 | |
| cccgcttctggagtgttatcgtcaccatgtccctaatggtctcggctggccggggcctgg | SEQ ID NO: 181 |
| gggccgtgtggtccccaacccacgtgcaggtgacggtgctgcaggcgcggggcctgcggg | |
| ccaagggccccgggggcacgagcgacgcgtacgcggtgatccaggtgggcaaggagaagt | |
| acgccacctccgtgtcggagcgcagcctgggcgcgcccgtgtggcgcgaggaggccacct | |
| tcgagctgccatcgctgctgtcctccggacccgcggccgccgccaccctgcagctcaccg | |
| tgctgcaccgcgcgctgctcggcctcgacaagttcctgggccgcgccgaggtggacctgc | |
| gggatctgcaccgcgaccagggccgcaggaagacgcagtggtataagttgaaatccaaac | |
| caggaaagaaggacaaggagcgaggagaaattgaggttgacatccagtttatgagaaaca | |
| acatgactgccagcatgtttgacctttctatgaaagacaagtctcggaatccatttggaa | |
| agctgaaggacaagatcaaggggaagaataaggacagtgggtcagacaccgcctccgcca | |
| tcatccctagcacgacaccttcggtcgacagtgatgatgagtctgtggttaaagacaaga | |
| aaaagaaatcaaagatcaagaccttactttccaagtcaaatttgcagaagacgcctcttt | |
| cccagtccatgtctgtcctgccgacttcaaagccagaaaaagtgctgcttcgtcccggag | |
| actttcagtcccagtgggatgaagatgacaatgaggatgagtcctcctcggcctcggatg | |
| tcatgtctcacaagagaacagcgagtacggatcttaagcaactgaaccaggtcaacttta | |
| cccttcccaagaaggaaggactttcctttcttggtggccttcggtctaagaatgatgtcc | |
| tttcccgctctaatgtctgcatcaatgggaaccatgtttacctggagcagccccaaccca | |
| ccggtgagatcaaggatagcagcccgtcctcctccccatcccccaagggtttcagaaaga | |
| aaacattgttctcttctacagagaacctggcggctgggtcttggaaggagcctgctgaag | |
| gaggtgggctgtctactgacagggatgtctccgaatcttccaccaaggactccttgaagt | |
| ctatgaccttgccgacctaccgacctgccccactgatcagtggggacctcagggaaaaaa | |
| tggcccccgcaaactcagaggccacaaaagaagctaaggagagcaagaagccagagagca | |
| ggaggtcctctttgctgtctctgatgacggggaagaaggatgtggctaagggcagtgaag | |
| gtgaaaaccttctcacggtcccagggagggagaaggaaggcatgctgatgggggttaagc | |
| cgggggaggacgcatcggggcctgctgaagaccttgtgagaagatctgagaaagatactg | |
| cagctgttgtctccagacagggcagctccctgaacctctttgaagatgtgcagatcacag | |
| aaccagaagctgagccagagtccaagtctgaaccgagacctccaatttcctctccgaggg | |
| ctccccagaccagagctgtcaagccccgacttcatcctgtgaagccaatgaatgccacgg | |
| ccaccaaggttgctaactgcagcttgggaactgccaccatcatcagtgagaacttgaaca | |
| atgaggtcatgatgaagaaatacagcccctcggaccctgcatttgcatatgcgcagctga | |
| cccacgatgagctgattcagctggtcctcaaacagaaggaaacgataagcaagaaggagt | |
| tccaggtccgcgagctggaagactacattgacaacctgcttgtcagggtcatggaagaaa | |
| cccccaatatcctccgcatcccgactcaggttggcaaaaaagcaggaaagatgtaaatca | |
| gcagaaaaaaaacaccgagacgtttctgtgacttcactttcacctgctccaggggtcaag | |
| gacttgccttgcctgataaccagccagcaggctccgaatcaccatctccctcacatgtta | |
| tccggcaagagt | |

[0312] TABLE 191

| | |
|---|---|
| cbe_4138433 KIFAP3 | |
| kinesin-associated protein 3 | |
| length = 2997 | |
| caagaggtgcagagcaagcgcatgcgtcgtgacggcccggcttaggcgactctgggcggg | SEQ ID NO: 182 |
| tctgggccgctccagtgttttggggcacagaagctgtgggaggagctggaggcttcaccg | |
| tggtaaccacagcgccgctgctgccccgccttgcaggcctcaggactgtcatcgcctctg | |
| ggtgtgagggtactttggccaccgtccccggaaataaccgcgcctgcctctcaagatacc | |
| ccatcctctccacgccgctgccgctgccgccatgcaaggggaggacgccagatacctcaa | |
| aaggaaagttaaaggagggaatatagatgtacatccatcagaaaaagcactcattgttca | |
| ctatgaagtggaagctaccattcttggagaaatgggggaccccatgttgggagaacgaaa | |
| agaatgtcaaaaaatcattcgacttaagagtctcaatgccaacacagatataacttccct | |
| ggcaaggaaggtggttgaagaatgtaaactcattcatccttcaaaactaaatgaggtaga | |
| acagctgttgtactatctacagaaccgccgtgattcattgtcaggaaaagagaaaaaaga | |
| aaaatcaagcaagcctaaagatccacctccttttgaaggaatggagattgatgaagttgc | |
| taacattaatgacatggatgaatatattgagttattatatgaagatattcctgacaaagt | |
| tcggggttctgctttgatcctgcagcttgctcgaaatcctgataacttggaagaactact | |
| attgaatgaaactgcccttggtgcattagcaagggtcctgagagaagactggaagcaaag | |
| tgtcgagttagctacaaacataatttacatctttttttgtttctccagcttttctcaatt | |
| tcatggacttattactcactataaaattggagctctgtgtatgaatattattgatcatga | |
| gttaaaaagacatgagctttggcaagaagaactctcaaagaagaagaaagctgttgatga | |
| agaccctgaaaaccaaaccttgagaaaggattatgaaaaaacctttaaaaagtaccaggg | |
| gcttgtggtaaaacaggaacagctattacgagttgctctttatttgcttctgaatcttgc | |
| tgaggatactcgtaccgaactgaaaatgaggaacaagaacatagttcacatgttggtgaa | |
| agcccttgatcgggacaattttgagctgctaattttagttgtgtcattcttgaagaaact | |
| cagcatttttatggagaataaaaatgatatggtggaaatggatattgttgaaaaactggt | |
| gaaaatgataccttgtgagcatgaagacctgctgaatatcaccctccgacttttactaaa | |
| cctatcctttgacacaggactgaggaataagatggtacaagttggactgcttcccaagct | |
| cactgcactcctaggcaatgacaactacaaacaaatagcaatgtgtgttctttaccacat | |
| aagcatggatgaccgctttaaatcaatgtttgcatacactgactgtataccacagttaat | |
| gaagatgctgtttgaatgttcagatgaacgaattgacttggaactcatttctttctgcat | |
| taatcttgctgctaacaaaagaaatgtacagcttatctgtgaaggaaatgggctgaagat | |
| gctcatgaagagggctctgaagtttaaggatccattgctgatgaaaatgattagaaacat | |
| ttctcagcatgatggaccaactaaaaatctgtttattgattatgttggggaccttgcagc | |
| ccagatctctaatgatgaagaagaggagtttgtgattgaatgtttgggaactcttgcaaa | |
| cttgaccattccagacttagactgggaattggttcttaaagaatataagttggttccata | |
| cctcaaggataaactaaaaccaggtgctgcagaagatgatcttgttttagaagtggttat | |
| aatgattggaactgtatccatggatgactcttgtgctgcattgctagccaaatctggcat | |
| aatccctgcactcattgaattgctaaatgctcaacaagaagatgatgaatttgtgtgtca | |
| gataatttatgtcttctaccagatggttttccaccaagccacaagagacgtcataatcaa | |
| ggaaacacaggctccagcatatctcatagacctaatgcatgataagaataatgaaatccg | |
| aaaggtctgtgataatacattagatattatagcggaatatgatgaagaatgggctaagaa | |
| aattcagagtgaaaagtttcgctggcataactctcagtggctggagatggtagagagtcg | |
| tcagatggatgagagtgagcagtacttgtatggtgatgatcgaattgagccatacattca | |
| tgaaggagatattctcgaaagacctgaccttttctacaactcagatggattaattgcctc | |
| tgaaggagccataagtcccgatttcttcaatgattaccaccttcaaaatggagatgttgt | |
| tgggcagcattcatttcctggcagccttggaatggatggctttggccaaccagttggcat | |
| tcttggacgccctgccacagcatatggattccgccctgatgaaccttactactatggcta | |
| tggatcttgataaagtatctgtttccatgtgtaatctcagcttagaagaaatctgtgtgg | |
| gttgggttaattttggatctttgcctaataatgcatgttgatgttattgtgggtctgtgt | |
| ttgtttttatttttatatgttgttagctgcagattaaccccagcccctctgtcttctgtt | |
| aagtacagttgatactgacattgttcactcatcaaaccacatcttgatgctaagtaacat | |
| ttcccatgagcctcaaaactgaatgctgaaaagctactagactggaaaacaaacactgca | |
| ttatgtatgttaagtgactaatttaatttcaattaaaaagcgtaaagtgaaaatgaa | |

[0313] TABLE 192

| | |
|---|---|
| cbe_422204 Prey2335 | |
| PathCalling Prey Sequence 2335 | |
| length = 394 | |
| aaggaaggaaggaaggaaggaaggaaggaaggaaagaaagaaattcatccagcatgtccc | SEQ ID NO: 183 |
| tttcttctcctatgggatttaccaactgacaaattctagtgctcctgccatcacccacac | |
| atgtgcagcaaagcctccacatttgcaaaatctaagtcaatctctaaaagatgcttcgag | |
| gaagcacccagttccttctgctaataaccgcagtgtgtcatgtgacacctccccctcccc | |
| caaccagttctctctgaaaactacccacccaccccaccaataaagtagcatgacgtctgt | |
| ccttcagctgccaatatctacaatcaaccaacaagtcattaaaaaaaaaaaaaaaaaaaa | |
| aaaaaaaaaaaaaaaaaaaaaaaaaaaaaaagaa | |

[0314] TABLE 193

| | |
|---|---|
| cbe_422227 Prey277610 | |
| PathCalling Prey Sequence 277610 | |
| length = 140 | |
| gtctgagtgctactgaagaggacgtcgtcacttctggaccaagccctgcccaacgacgtc | SEQ ID NO: 184 |
| ctcttcagtagcacgtacccttctctccccaagtcgatcccgttgaggaggccttcttac | |
| accttaggaatgaaatcgct | |

[0315] TABLE 194

| | |
|---|---|
| cbe_422236 BCR1 | |
| PathCalling Prey Sequence 1759 | |
| length = 553 | |
| ggcagaggggttacaactcaggttcccacacctcgcttttcacagcctccgagggcagca | SEQ ID NO: 185 |
| gtgcacatgggggagacatctcccacgaggccaaggcctccagtgctcaccgatgccctc | |
| tgtgaagttggggtagaactcgtcagtgaaaaggggctcgggcagctcacggaagtacag | |
| cttcagcatgcctgcgatggcgttcacgtccatctcgctcatcatcaccgacacgtcctt | |
| gttatctggaaagagcatggaaatgcagcggcctccttgaagatcctgataaatgaagaa | |
| aagacacagagaaggatgtgacatgcctgggccgtggagcactctgagatctcatcgcgg | |
| acaccactgcccacacctccatcccgtcctgcgcaggccggcactcactgacgttgaagc | |
| ctgccttcagtgcctggatgtccgtggccaccccagacatgcggtagatgcccacctcct | |
| ccatgcctcggcgcttgatctcctcacacactggcgcacgatgtagggcacttggacctc | |
| tctctcctgcgga | |

[0316] TABLE 195

| | |
|---|---|
| cbe_4279962 DKKL1-pending | |
| soggy-1 gene | |
| length = 908 | |
| aaaattcggcacgaggccgggctgtggtctagcataaaggcggagcccagaagaaggggc | SEQ ID NO: 186 |
| ggggtatgggagaagcctccccacctgcccccgcaaggcggcatctgctggtcctgctgc | |
| tgctcctctctaccctggtgatcccctccgctgcagctcctatccatgatgctgacgccc | |
| aagagagctccttgggtctcacaggcctccagagcctactccaaggcttcagccgacttt | |
| tcctgaaaggtaacctgcttcggggcatagacagcttattctctgcccccatggacttcc | |
| ggggcctccctgggaactaccacaaagaggagaaccaggagcaccagctggggaacaaca | |
| ccctctccagccacctccagatcgacaagatgaccgacaacaagacaggagaggtgctga | |
| tctccgagaatgtggtggcatccattcaaccagcggaggggagcttcgagggtgatttga | |
| aggtacccaggatggaggagaaggaggccctggtacccatccagaaggccacggacagct | |
| tccacacagaactccatccccgggtggccttctggatcattaagctgccacggcggaggt | |
| cccaccaggatgccctggagggcggccactggctcagcgagaagcgacaccgcctgcagg | |
| ccatccgggatggactccgcaaggggacccacaaggacgtcctagaagaggggaccgaga | |
| gctcctcccactccaggctgtccccccgaaagacccacttactgtacatcctcaggccct | |
| ctcggcagctgtaggggtggggaccggggagcacctgcctgtagcccccatcagaccctg | |
| ccccaagcaccatatggaaataaagttctttcttacatctaaaaaaaaaaaaaaaaaaaa | |
| aaaaaaaa | |

[0317] TABLE 196

| | |
|---|---|
| cbe_4281271 CRYAB | |
| crystallin, alpha B | |
| length = 691 | |
| gacccctcacactcacctagccaccatggacatcgccatccaccacccctggatccgccg | SEQ ID NO: 187 |
| ccccttctttcctttccactcccccagccgcctctttgaccagttcttcggagagcacct | |
| gttggagtctgatcttttcccgacgtctacttccctgagtcccttctaccttcggccacc | |
| ctccttcctgcgggcacccagctggtttgacactggactctcagagatgcgcctggagaa | |
| ggacaggttctctgtcaacctggatgtgaagcacttctccccagaggaactcaaagttaa | |
| ggtgttgggagatgtgattgaggtgcatggaaaacatgaagagcgccaggatgaacatgg | |
| tttcatctccagggagttccacaggaaataccggatcccagctgatgtagaccctctcac | |
| cattacttcatccctgtcatctgatggggtcctcactgtgaatggaccaaggaaacaggt | |
| ctctggccctgagcgcaccattcccatcacccgtgaagagaagcctgctgtcaccgcagc | |
| ccccaagaaatagatgccctttcttgaattgcattttttaaaacaagaaagtttccccac | |
| cagtgaatgaaagtcttgtgactagtgctgaagcttattaatgctaagggcaggcccaaa | |
| ttatcaagctaataaaatatcattcagcaac | |

[0318] TABLE 197

| | |
|---|---|
| cbe_4344185 SRA1 | |
| steroid receptor RNA activator 1 | |
| length = 2069 | |
| ttatagcaaaatcagtgcaaataaaaatccctcagtgacctcactggatgtgagtatatt | SEQ ID NO: 188 |
| gggcctgggacagggctgggggctaacaccctgtgtgagatgagtgtctttgtgtctgtg | |
| cttgatgttggtggctctctgtagtcacatgacagcatgggtgtgatggagatctgactt | |
| cattcaacaaacatattttctaaggagttccctgtgccaggcactaagctgggcactggg | |
| aatgtaataaaatagtcaaggtcccaccttctaagactgtccgacagggaaacgaacaag | |
| agtcaaataaggcagaagatgtgatgtaatacacctacgaaatctcagagggttgtaggg | |
| tcgtgggagctcaagtgagacacttaacctggcctgagacattccagaaggcctcctgaa | |
| gaactgacatctgaactgagaactgaaggaagatgagtactagtgaggctaccggacgtg | |
| aatgtggagattgtgcagggcaatgcaagaggaggctgtagaagtcaacctggctagatc | |
| acagcggggtgtatgtggggcaggagcttctttgtttgaatttgctcctgagaggatgag | |
| gcctcctagagcactggctcctggacagcaacctcctttggtgccttgtgaccagggccc | |
| tgatggttcattagatggagccttcgagtcttagggagttgccgcagggtccccacagcg | |
| gctcccgacggttgtgaaccagcatccattctccacggattccggcaacccgcctggccc | |
| tggacgtgtctcaactggcccgcgtgaggggccgccccggaaatgacgcgctgccccgct | |
| ggccaagcggaagtggagatggcggagctgtacgtgaagccgggcaacaaggaacgcggc | |
| tggaacgacccgccgcagttctcatacgggctgcagacccaggccggcggacccaggcgc | |
| tcgctgcttaccaagagggtagccgcaccccaggatggatcccccagagtccccgcatca | |
| gagacttctcctgggcctcccccaatggggcctccacctccttcaagtaaggctcccagg | |
| tccccacctgtggggagtggtcctgcctctggcgtggagcccacaagtttcccagtcgag | |
| tctgaggctcgactgatggaggatgtgctgagacctttggaacaggcattggaagactgc | |
| cgtggccacacaaggaagcaggtatgtgatgacatcagccgacgcctggcactgctgcag | |
| gaacagtgggctggaggaaagttgtcaatacctgtaaagaagagaatggctctactggtg | |
| caagagctttcaagccaccggtgggacgcagcagatgacatccaccgctccctcatggtt | |
| gaccatgtgactgaggtcagtcagtggatggtaggagttaaaagattaattgcagaaaag | |
| aggagtctgttttcagaggaggcagccaatgaagagaaatctgcagccacagctgagaag | |
| aaccataccataccaggcttccagcaggcttcataatcctcggttccccagactcaccgg | |
| acaccatcccctatgccttggagaccttctgtcacttggctcccttcttaccaccaccaa | |
| gactgtcccactgggcctgacccacctatgagggaagaagtcccacctgggccagaggga | |
| gttcatgtgttactcataacatgcatttcaataaaaacatctctgcggtgggccttgggt | |
| aggagagatgaacccttccggtgccaagctagtcccctctggtgtcctcgactgccctgc | |
| tccctgtgtatctgcaaacctctgttctcccttctccattcatcaggaagggatctgctg | |
| ggtaaagtcagactactgcctaccactttttcccaaagtagactgaaagcacatcctgtg | |
| ctgggcggagcagctgtgtttggatggtttcatttcagcatgagaacagactcaaataga | |
| acggggagacttttccctcaacaaaaggaaagacagtcctatttgcactgtatcaccctt | |
| gagatactactgttacagagattagaacc | |

[0319] TABLE 198

| | |
|---|---|
| cbe_4383836 KIAA0905 | |
| yeast Sec31p homolog | |
| length = 4129 | |
| gacgagcgctgcactaacgcaggatccggctgccgaaggtcctcgccagcaggatgaagt | SEQ ID NO: 189 |
| taaaggaagtagatcgtacagccatgcaggcatggagccctgcccagaatcaccccattt | |
| acctagcaacaggaacatctgctcagcaattggatgcaacatttagtacgaatgcttccc | |
| ttgagatatttgaattagacctctctgatccatccttggatatgaaatcttgtgccacat | |
| tctcctcttctcacaggtaccacaagttgatttgggggccttataaaatggattccaaag | |
| gagatgtctctggagttctgattgcaggtggtgaaaatggaaatattattctctatgatc | |
| cttctaaaattatagctggagacaaggaagttgtgattgcccagaatgacaagcatactg | |
| gcccagtgagagccttggatgtgaacattttccagactaatctggtagcttctggtgcta | |
| atgaatctgaaatctacatatgggatctaaataattttgcaaccccaatgacaccaggag | |
| ccaaaacacagccgccagaagatatcagctgcattgcatggaacagacaagttcagcata | |
| ttttagcatcagccagtcccagtggccgggccactgtatgggatcttagaaaaaatgagc | |
| caatcatcaaagtcagtgaccatagtaacagaatgcattgttctgggttggcatggcatc | |
| ctgatgttgctactcagatggtccttgcctccgaggatgaccggttaccagtgatccaga | |
| tgtgggatcttcgatttgcttcctctccacttcgtgtcctggaaaaccatgccaggggga | |
| ttttggcaattgcttggagcatggcagatcctgaattgttactgagctgtggaaaagatg | |
| ctaagattctctgctccaatccaaacacaggagaggtgttatatgaacttcccaccaaca | |
| cacagtggtgcttcgatattcagtggtgtccccgaaatcctgctgtcttatcagctgctt | |
| cgtttgatgggcgtatcagtgtttattctatcatgggaggaagcacagatggtttaagac | |
| agaaacaagttgacaagctttcatcatcttttgggaatcttgatccctttggcacaggac | |
| agccccttcctccgttacaaattccacagcagactgctcagcatagtatagtgctgcctc | |
| tgaagaagccgcccaagtggattcgaaggcctgttggtgcttctttttcatttggaggca | |
| aactggttacgtttgagaatgtcagaatgccttctcatcagggagctgagcagcagcagc | |
| agcagcaccatgtgttcattagtcaggttgtaacagaaaaggagttcctcagccgatcag | |
| accaacttcagcaggctgtgcagtcacaaggatttatcaattattgccaaaaaaaaattg | |
| atgcttctcagactgaatttgagaaaaatgtgtggtcctttttgaaggtaaactttgagg | |
| atgattctcgtggaaaataccttgaacttctaggatacagaaaagaagatctaggaaaga | |
| agattgctttggccttgaacaaagtggatggagccaatgtggctcttaaagactctgacc | |
| aagtagcacagagtgatggggaggagagccctgctgctgaagagcagctcttgggagagc | |
| acattaaagaggaaaaagaagaatctgaatttctaccctcatctggaggaacatttaata | |
| tctctgtcagtggggacattgatggtttaattactcaggctttgctgacgggcaattttg | |
| agagtgctgttgacctttgtttacatgataaccgcatggccgatgccattatattggcca | |
| tagcaggtggacaagaactcttggctcgaacccagaaaaaatacttcgcaaaatcccaaa | |
| gcaaaattaccaggctcatcactgcagtggtgatgaagaactggaaagagattgttgagt | |
| cttgtgatcttaaaaattggagagaggctttagctgcagtattgacttatgcaaagccgg | |
| atgaattttcagccctttgtgatcttttgggaaccaggcttgaaaatgaaggagatagcc | |
| tcctgcagactcaagcatgtctctgctatatttgtgcagggaatgtagagaaattagttg | |
| catgttggactaaagctcaagatggaagccaccctttgtcacttcaggatctgattgaga | |
| aagttgtcatcctgcgaaaagctgtgcaactcactcaagccatggacactagtactgtag | |
| gagttctcttggctgcgaagatgagtcagtatgccaatttgttggcagctcagggcagta | |
| ttgctgcagccttggcttttcttcctgacaacaccaaccagccaaatatcatgcagcttc | |
| gtgacagactttgtagagcacaaggagagcctgtagcaggacatgaatcacctaaaattc | |
| cgtacgagaaacagcagctccccaagggcaggcctggaccagttgctggccaccaccaga | |
| tgccaagagttcaaactcaacaatattatccccatggagaaaatcctccacctccgggtt | |
| tcataatgcatggaaatgttaatccaaatgcttctggtcagcttcccacatctccaggtc | |
| atatgcacacccaggtaccaccttatccacagccacagccttatcaaccagcccagccgt | |
| atcccttcggaacaggggggtcagcaatgtatcgacctcagcagcctgttgctcctccta | |
| cttcaaacgcttaccctaacaccccttacatatcttctgcttcttcctatactgggcagt | |
| ctcagctgtacgcagcacagcaccaggcctcttcacctacctccagccctgctacttctt | |
| tccctcctcccccttcctctggagcatccttccagcatggcggaccaggagctccaccat | |
| catcttcagcttatgcactgcctcctggaacaacaggtacactgcctgctgccagtgagc | |
| tgcctgcgtcccaaagaacaggtcctcagaatggttggaatgaccctccagctttgaaca | |
| gagtacccaaaaagaagaagatgcctgaaaacttcatgcctcctgttcccatcacatcac | |
| caatcatgaacccgttgggtgacccccagtcacaaatgctgcagcaacagccttcagctc | |
| cagtaccactgtcaagccagtcttcattcccacagccacatcttccaggtggccagccct | |
| tccatggcgtacagcaacctcttggtcaaacaggcatgccaccatctttttcaaagccca | |
| atattgaaggtgccccaggggctcctattggaaataccttccagcatgtgcagtctttgc | |
| caacaaaaaaaattaccaagaaacctattccagatgagcacctcattctaaagaccacat | |
| ttgaggatcttattcagcgctgcctttcttcagcaacagaccctcaaaccaagaggaagc | |
| tagatgatgccagcaaacgtttggagtttctgtatgataaacttagggaacagacacttt | |
| caccaacaatcaccagtggtttacacaacattgcaaggagcattgaaactcgaaactact | |
| cagaaggattgaccatgcatacccacatagttagcaccagcaacttcagtgagacctctg | |
| ctttcatgccagttctcaaagttgttctcacccaggccaataagctgggtgtctaaaagg | |
| acagcttctcttccactcaatattgccatttttccaaagaaacatgttaaaaaaaaaaat | |
| tataagacatggactagtcctcattagcatgtttgcatagcaaccagtcaagagcattta | |
| cactatttctgctgatatactcaccttagaactgctcagaaccctggtgctttatttttg | |
| ttttaatcttttgttgccagtgatgattttcctattctgcaaatagtgtatttcctggat | |
| tacacatagtatggtttcctgaagtattctgataaatgtgtttttttaaaacctcaatat | |
| actttttagaaaaggagcatctggttatgcataaagcagagctaaaactaaatttctttc | |
| atgtcctccctacttcctcagtgtcaatcagattaaagtgtgtaatcct | |

[0320] TABLE 199

| | |
|---|---|
| cbe_4465094 Prey1053092 | |
| PathCalling Prey Sequence 1053092 | |
| length = 452 | |
| TCACAAACAAGCCTTCAGAATCAGATGAATGGAGGACCTTTTTATAGCCAGAATCCAGTT | SEQ ID NO: 190 |
| TCAGATACACCACCTCCACCGCCACCTGTGGAAGAACCAGTCTTTGATGAGTCTCCCCCA | |
| CCTCCTCCTCCTCCAGAAGATTACGAAGAGGAGGAAGCTGCTGTGGTTGAGTATAGTGAT | |
| CCTTATGCTGAAGAGGACCCACCGTGGGCTCCACGTTCTTACTTGGAAAAGGTTGTGGCA | |
| ATTTATGACTATACAAAAGACAAGGAAGATGAGCTGTCCTTTCAGGAAGGAGCCATTATT | |
| TATGTCATCAAGAAGAATCACGATGTATTAAAAACAAAGCAAGCTGAGTCTGAACAAATG | |
| GATCTTTCTGCCATCATTTGTACAATCCTGAGCTGTCTGGATTGAAATAAAATGACCATT | |
| TTTATGTATGTCAAAAAAAAAAAAAAAAACCC | |

[0321] TABLE 200

| | |
|---|---|
| cbe_4540466 PUM1 | |
| pumilio homolog 1 (Drosophila) | |
| length = 5390 | |
| gggggtgaaaggtaagggggagcgagagcgccagagagagaagatcggggggctgaaatc | SEQ ID NO: 191 |
| catcttcatcctaccgctccgcccgtgttggtggaatgagcgttgcatgtgtcttgaaga | |
| gaaaagcagtgctttggcaggactctttcagcccccacctgaaacatcaccctcaagaac | |
| cagctaatcccaacatgcctgttgttttgacatctggaacagggtcgcaagcgcagccac | |
| aaccagctgcaaatcaggctcttgcagctgggactcactccagccctgtcccaggatcta | |
| taggagttgcaggccgttcccaggacgacgctatggtggactacttctttcagaggcagc | |
| atggtgagcagcttgggggaggaggaagtggaggaggcggctataataatagcaaacatc | |
| gatggcctactggggataacattcatgcagaacatcaggtgcgttccatggatgaactga | |
| atcatgattttcaagcacttgctctggagggaagagcgatgggagagcagctcttgccag | |
| gtaaaaagttttgggaaacagatgaatccagcaaagatggaccaaaaggaatattcctgg | |
| gtgatcaatggcgagacagtgcctggggaacatcagatcattcagtttcccagccaatca | |
| tggtgcagagaagacctggtcagagtttccatgtgaacagtgaggtcaattctgtactgt | |
| ccccacgatcggagagtgggggactaggcgttagcatggtggagtatgtgttgagctcat | |
| ccccgggcgattcctgtctaagaaaaggaggatttggcccaagggatgcagacagtgatg | |
| aaaacgacaaaggtgaaaagaagaacaagggtacgtttgatggagataagctaggagatt | |
| tgaaggaggagggtgatgtgatggacaagaccaatggtttaccagtgcagaatgggattg | |
| atgcagacgtcaaagattttagccgtacccctggtaattgccagaactctgctaatgaag | |
| tggatcttctgggtccaaaccagaatggttctgagggcttagcccagctgaccagcacca | |
| atggtgccaagcctgtggaggatttctccaacatggagtcccagagtgtccccttggacc | |
| ccatggaacatgtgggcatggagcctcttcagtttgattattcaggcacgcaggtacctg | |
| tggactcagcagcagcaactgtgggactttttgactacaattctcaacaacagctgttcc | |
| aaagacctaatgcgcttgctgtccagcagttgacagctgctcagcagcagcagtatgcac | |
| tggcagctgctcatcagccgcacatcggtttagctcccgctgcgtttgtccccaatccat | |
| acatcatcagcgctgctcccccagggacggacccctacacagctggattggctgcagcag | |
| cgacactaggcccagctgtggtccctcaccagtattatggagttactccctggggagtct | |
| accctgccagtcttttccagcagcaagctgccgctgccgctgcagcaactaattcagcta | |
| atcaacagaccaccccacaggctcagcaaggacagcagcaggttctccgtggaggagcca | |
| gccaacgtcctttgaccccaaaccagaaccagcagggacagcaaacggatccccttgtgg | |
| cagctgcagcagtgaattctgcccttgcatttggacaaggtctggcagcaggcatgccag | |
| gttatccggtgttggctcctgctgcttactatgaccaaactggtgcccttgtagtgaatg | |
| caggcgcgagaaatggtcttggagctcctgttcgacttgtagctcctgccccagtcatca | |
| ttagttcctcagctgcacaagcagctgttgcagcagccgcagcttcagcaaatggagcag | |
| ctggtggtcttgctggaacaacaaatggaccatttcgccctttaggaacacagcagcctc | |
| agccccagccccagcagcagcccaataacaacctggcatccagttctttctacggcaaca | |
| actctctgaacagcaattcacagagcagctccctcttctcccagggctctgcccagcctg | |
| ccaacacatccttgggattcggaagtagcagttctctcggcgccaccctgggatccgccc | |
| ttggagggtttggaacagcagttgcaaactccaacactggcagtggctcccgccgtgact | |
| ccctgactggcagcagtgacctttataagaggacatcgagcagcttgacccccattggac | |
| acagtttttataacggccttagcttttcctcctctcctggacccgtgggcatgcctctcc | |
| ctagtcagggaccaggacattcacagacaccacctccttccctctcttcacatggatcct | |
| cttcaagcttaaacctgggaggactcacgaatggcagtggaagatacatctctgctgctc | |
| caggcgctgaagccaagtaccgcagtgcaagcagcgcctccagcctcttcagcccgagca | |
| gcactcttttctcttcctctcgtttgcgatatggaatgtctgatgtcatgccttctggca | |
| ggagcaggcttttggaagattttcgaaacaaccggtaccccaatttacaactgcgggaga | |
| ttgctggacatataatggaattttcccaagaccagcatgggtccagattcattcagctga | |
| aactggagcgtgccacaccagctgagcgccagcttgtcttcaatgaaatcctccaggctg | |
| cctaccaactcatggtggatgtgtttggtaattacgtcattcagaagttctttgaatttg | |
| gcagtcttgaacagaagctggctttggcagaacggattcgaggccacgtcctgtcattgg | |
| cactacagatgtatggctgccgtgttatccagaaagctcttgagtttattccttcagacc | |
| agcagaatgagatggttcgggaactagatggccatgtcttgaagtgtgtgaaagatcaga | |
| atggcaatcacgtggttcagaaatgcattgaatgtgtacagccccagtctttgcaattta | |
| tcatcgatgcgtttaagggacaggtatttgccttatccacacatccttatggctgccgag | |
| tgattcagagaatcctggagcactgtctccctgaccagacactccctattttagaggagc | |
| ttcaccagcacacagagcagcttgtacaggatcaatatggaaattatgtaatccaacatg | |
| tactggagcacggtcgtcctgaggataaaagcaaaattgtagcagaaatccgaggcaatg | |
| tacttgtattgagtcagcacaaatttgcaagcaatgttgtggagaagtgtgttactcacg | |
| cctcacgtacggagcgcgctgtgctcatcgatgaggtgtgcaccatgaacgacggtcccc | |
| acagtgccttatacaccatgatgaaggaccagtatgccaactacgtggtccagaagatga | |
| ttgacgtggcggagccaggccagcggaagatcgtcatgcataagatccggccccacatcg | |
| caactcttcgtaagtacacctatggcaagcacattctggccaagctggagaagtactaca | |
| tgaagaacggtgttgacttagggcccatctgtggcccccctaatggtatcatctgaggca | |
| gtgtcacccgctgttccctcattcccgctgacctcactggcccactggcaaatccaacca | |
| gcaaccagaaatgttctagtgtagagtctgagacgggcaagtggttgctccaggattact | |
| ccctcctccaaaaaaggaatcaaatccacgagtggaaaagcctttgtaaatttaatttta | |
| ttacacataacatgtactattttttttaattgactaattgccctgctgttttactggtgt | |
| ataggatacttgtacataggtaaccaatgtacatgggaggccacatattttgttcactgt | |
| tgtatctatatttcacatgtggaaactttcagggtggttggtttaacaaaaaaaaaaagc | |
| tttaaaaaaaaaagaaaaaaaggaaaaggtttttagctcatttgcctggccggcaagttt | |
| tgcaaatagctcttccccacctcctcattttagtaaaaaacaaacaaaaacaaaaaaacc | |
| tgagaagtttgaattgtagttaaatgaccccaaactggcatttaacactgtttataaaaa | |
| atatatatatatatatatatatataatgaaaaaggtttcagagttgctaaagcttcagtt | |
| tgtgacattaagtttatgaaattctaaaaaatgccttttttggagactatattatgctga | |
| agaaggctgttcgtgaggaggagatgcgagcacccagaacgtcttttgaggctgggcggg | |
| tgtgattgtttactgcctactggatttttttctattaacattgaaaggtaaaatctgatt | |
| atttagcatgagaaaaaaaaatccaactctgcttttggtcttgcttctataaatatatag | |
| tgtatacttggtgtagactttgcatatatacaaatttgtagtattttcttgttttgatgt | |
| ctaatctgtatctataatgtaccctagtagtcgaacatacttttgattgtacaattgtac | |
| atttgtatacctgtaatgtaaatgtggagaagtttgaatcaacataaacacgttttttgg | |
| taagaaaagagaattagccagccctgtgcattcagtgtatattctcaccttttatggtcg | |
| tagcatatagtgttgtatattgtaaattgtaatttcaaccagaagtaaatttttttcttt | |
| tgaaggaataaatgttctttatacagcctagttaatgtttaaaaagaaaaaaatagcttg | |
| gttttatttgtcatctagtctcaagtatagcgagattctttctaaatgttattcaagatt | |
| gagttctcactagtgtttttttaatcctaaaaaagtaatgttttgattttgtgacagtca | |
| aaaggacgtgcaaaagtctagccttgcccgagctttccttacaatcagagcccctctcac | |
| cttgtaaagtgtgaatcgcccttcccttttgtacagaagatgaactgtattttgcatttt | |
| gtctacttgtaagtgaatgtaacatactgtcaattttccttgtttgaatatagaattgta | |
| acactacacggtgtacatttccagagccttgtgtatatttccaatgaacttttttgcaag | |
| cacacttgtaaccatatgtgtataattaacaaacctgtgtatgcttatgcctgggcaact | |
| attttttgtaactcttgtgtagattgtctctaaacaatgtgtgatctttattttgaaaaa | |
| tacagaactttggaatctgaaaaaaaaaaaaaaaaaaaaaaaaaaaaaaa | |

[0322] TABLE 201

| | |
|---|---|
| cbe_4567083 LOC157378 | |
| hypothetical protein BC017881 | |
| length = 2604 | |
| ggctgggcacgcaccccaagaaggagcccatggaggcgctgaacacggcgcagggcgcgc | SEQ ID NO: 192 |
| gcgacttcatctacagcctgcactccacggagaggagctgcctgctcaaagagctgcacc | |
| gcttcgagtctattgccattgcccaagaaaaattggaagctccaccacccaccccaggac | |
| agctgagatatgtattcatccacaatgcgatacctttcatagggtttggctttttggata | |
| atgcaattatgattgttgctggaacccatattgaaatgtctattggaattattttgggaa | |
| tttcaactatggcagctgctgctttgggaaatcttgtgtcagatctagctggacttggac | |
| ttgcaggctacgttgaagcattggcttccaggttaggcctgtcaattcctgatctcacac | |
| caaagcaagttgacatgtggcaaacacgtcttagtacacatttgggcaaagctgttgggg | |
| tgactattggctgcattctaggaatgtttcctttaattttctttggaggaggtgaagaag | |
| atgaaaaactggaaacgaaaagttaatcctcttagaatacctataaaaagatgtaaacta | |
| atgtacctcagtaattaaatatgctgtcacaacatttaggaattaagacagtaacagtat | |
| agatatgggatcaaataatttagcatgtattatggaaaacactaacttattgtggcttga | |
| tcttcttaggacatcttttttaaaaagctgtttagtatcattttgtgtatattgttgaaa | |
| tgctttttcatcaatagcagtcaacattttatcctttctttttatattcataatgttatt | |
| taagtgtcattgatgtactgtattgacttggggtttgcttatttgttacttaacatgtgt | |
| acatgcatgaaagcatttttcgttgttccctgatagttacatttcaaccttgggattttt | |
| ccaaattacttaagatgtttaatgtcagttaaagatttttttaccctctttttgggaaca | |
| tcaattttgtactgttatgcagtaaacatttataataatataatttcagtcatttcttaa | |
| ctgtcacatctattgaaaatggatatagatacaggttttaagtattttaagtatatatta | |
| cttattttaattttctgactttactattttaagggccagagggttaatcacaaagagcaa | |
| ttatgtggtctccctgctacatgaaaccgtgtatactaacaagcgtacaatttttagttg | |
| attttttttaaccttttagtttcccagttttgaataattacatggtggattctgactttt | |
| gaggggaagcaaatgattattttagagtctttgaaatggggattgtggaattagattgaa | |
| ctaagggatttaacatgatgcttggaaattaagagactaaagctttttttaaaaaaaggt | |
| ggaaaataggaactgtcaagaaggtttatggtataaatgatgaagttgaagtgatgtttg | |
| aaagattaatgagatacaatttatattatttggtaaggtttttttttttccctccaaaga | |
| tgtcatcttctcatctgaatggaataagtctgaataccccatattcatactcctaatctc | |
| attatatcttatttagtgaattttatttatgaataatttctgttgaagtgaaaactagat | |
| atttaatattttgcttttttgctacatagtctactcaaaaattacatgaggagaaatcct | |
| ttttccctttgtttttcttttttcttcttttgtggtatttaaagcatattttaggttgaa | |
| gttacttatttctagtcttgtacttctggcttaagtataaccatgtaagaattataaatt | |
| ttagttttctgaacccttaaacttttttagcatgtggtctgttacacatgctaaaaaatt | |
| agtcttacttgtaacagcgtaattaaacacatcatggaggagagaaacttaaaatagtat | |
| tttggcttttgaagttatttgtgttgctaaatagatgcagaggttttacagcagtttatt | |
| ttaaggttttatttatacataattactttgaactcttcagagtagatattttttcacaag | |
| gcagtttgtcataaattctctcatgcgcttcagaatgcataagtgccatcctttaatcat | |
| agactttgaggagagaaagcataaaaatatagcatataatctaaaaataaatatataaca | |
| tgcacaaataatgtgacattcttactgaatcaaatcatgattctagaacttgagatctta | |
| aatagaattccggtttgtatcttccatataataaccacacacagataaccacacaaaaaa | |
| tcctttgtaaaatttctgattgataggattagagtgcttaaatttttggggggggaaggg | |
| tggggtaaagtgtaagtgctttcttttgtccctaacttgtgtattgatggcagtccactc | |
| tgttttctaaaaatgtattttactgtggtgcttaacttcttattaattaaatcccgtatc | |
| agaaaccttgaaaaaaaaaaaaaaaaaaaaaaaaaaaaaaaaaaaaaaaaaaaaaaaaaa | |
| aaaaaaaaaaaaaaaaaaaaaaaa | |

[0323] TABLE 202

| | |
|---|---|
| cbe_552305 Prey2354 | |
| PathCalling Prey Sequence 2354 | |
| length = 241 | |
| aaggaaggaaggaaggaaggaaggaaggaaggaaagaaagaaattcatccagcatgtccc | SEQ ID NO: 193 |
| tttcttctcctatgggatttaccaactgacaaattctagtgctcctgccatcacccacac | |
| atgtgcagcaaagcctccacatttgcaaaatctaagtcaatctctaaaagatgcttcgag | |
| gaagcacccagttccttctgctaataaccgcagtgtgtcatgtgacacctccccctcccc | |
| g | |

[0324] TABLE 203

| | |
|---|---|
| cbe_552975 HPV 1a E1 | |
| Human Papillomavirus 1a E1 | |
| length = 1839 | |
| atggcagataataaaggtactgaaaacgattggtttttggtggaggcgacagattgtgag | SEQ ID NO: 194 |
| gaaacgttagaggaaacctcacttggtgacctagataatgtttcttgtgttagcgactta | |
| tctgatttattagacgaggcgccgcaaagccaggggaattccctggaattgttccacaag | |
| caagaatcgctggaaagcgaacaggaacttaatgctttaaaacgaaagttactttacagt | |
| cctcaggcgagaagcgcggacgaaacagacattgctagcattagtcctagattagaaact | |
| atttctattacaaagcaagacaaaaaaaggtatcgaaggcaactgttttctcaggatgat | |
| agtggtttagagctatcgctgcttcaggatgaaactgaaaatattgatgaatcgacacag | |
| gtagatcaacagcagaaagaacatactggggaagttggggccgctggggtgaacattttg | |
| aaagctagtaatatccgcgccgcattattaagcagatttaaagatacggctggcgtcagt | |
| tttacagacctgacgcggtcgtacaagagcaacaaaacctgttgtggagattgggttttg | |
| gcagtttggggtgtccgtgaaaatttaattgacagtgtaaaagaattattgcaaacccat | |
| tgtgtgtatattcaattggaacatgcagtaactgaaaaaaatagatttttatttttattg | |
| gtacgatttaaagcccagaaaagtagagagactgtgataaaacttataaccacaattctt | |
| ccagttgatgctagctatattttgtctgagcctccaaaatcaagaagtgtggctgctgca | |
| ttattttggtataaaagatctatgtcttcaactgtttttacatggggtacaactttggag | |
| tggattgcacagcaaacccttattaatcatcagttagattccgaaagtccctttgagctt | |
| tgtaaaatggttcagtgggcctatgataatggacatacagaagagtgtaaaattgcatat | |
| tattatgctgttttagcagatgaggatgaaaatgcaagggcatttctaagctctaattca | |
| caggcaaaatatgtgaaagactgtgcacaaatggtaagacactatttacgtgctgagatg | |
| gcacaaatgtctatgtcagagtggatttttagaaaactagataatgtagaaggttctggt | |
| aattggaaagaaattgtaagatttttaagatttcaagaagttgaatttataagctttatg | |
| attgcatttaaagatttgttatgtggtaagccaaagaaaaactgtttgttaatatttgga | |
| cctccaaatacaggaaaatcaatgttttgtacaagtttattaaagttgttaggagggaaa | |
| gtgatttcatactgtaacagtaaaagtcagttttggttgcagcctctggctgatgctaag | |
| atagggctattagatgatgcaacaaagccatgttgggattatatggacatttatatgaga | |
| aatgcattggatggtaacactatttgtattgatttaaaacatagagctcctcaacaaatt | |
| aaatgcccacctttacttattactagtaatattgatgttaaatcagatacctgttggatg | |
| tatttgcatagtagaatatcagcttttaaatttgctcatgagtttccatttaaagacaat | |
| ggtgatccaggattttccttaacagacgaaaattggaaatctttctttgaaaggttttgg | |
| caacagttagaattaagtgaccaagaagacgagggaaacgatggaaaacctcagcagtcg | |
| cttagacttactgcaagagcagctaatgaacctatatga | |

[0325] TABLE 204

| | |
|---|---|
| cbe_552976 HPV 11 L2 | |
| Human papillomavirus 11 L2 | |
| length = 1368 | |
| atgaaacctagggcacgcagacgtaaacgtgcgtcagccacacaactatatcaaacatgc | SEQ ID NO: 195 |
| aaggccactggtacatgtcccccagatgtaattcctaaagttgaacatactactattgca | |
| gatcaaatattaaaatggggaagcttaggggttttttttggtgggttaggtattggtaca | |
| ggggctggtagtggcggtcgtgcagggtatatacccttgggaagctctcccaagcctgct | |
| attactggggggccagcagcacgtccgccagtgcttgtggagcctgttgccccttccgat | |
| ccctccattgtgtccttaattgaggagtctgctattattaatgctggtgcacctgaggtg | |
| gtaccccctacacagggtggctttactataacatcatctgaatcgactacacctgctatt | |
| ttagatgtgtctgttaccaatcacactaccactagtgtgtttcaaaatcccctgtttaca | |
| gaaccgtctgtaatacagccccaaccacctgtggaggccagtggtcacatacttatatct | |
| gccccaacaataacatcccaacatgtagaagacattccactagacacttttgttgtatcc | |
| tctagtgatagtggacctacatccagtactcctcttcctcgtgcttttcctcggcctcgg | |
| gtgggtttgtatagtcgtgccttacagcaggtacaggttacggaccccgcgtttttgtcc | |
| acgccacagcgattggtaacttatgacaaccctgtctatgaaggagaagatgtaagttta | |
| caatttacccatgagtctatccacaatgcacctgatgaagcatttatggatattattaga | |
| ctacatagaccagctataacgtccagacggggtcttgtgcgttttagtcgcattgggcaa | |
| cgggggtccatgtacacacgcagtggacaacatataggtgcccgcatacattattttcag | |
| gacatttcaccagttacacaagctgcagaggaaatagaactgcaccctctagtggctgca | |
| gaaaatgacacgtttgatatttatgctgaaccatttgaccctatccctgaccctgtccaa | |
| cattctgttacacagtcttatcttacctccacacctaataccctttcacaatcgtggggt | |
| aataccacagtcccattgtcaatccctagtgactggtttgtgcagtctgggcctgacata | |
| acttttcctactgcatctatgggaacaccctttagtcctgtaactcctgctttacctaca | |
| ggccctgtttttattacaggttctgacttctatttgcatcctacatggtactttgcacgc | |
| agacgccgtaaacgtattcccttattttttacagatgtggcggcctag | |

[0326] TABLE 205

| | |
|---|---|
| cbe_6464 Hs. 19954 | |
| 603029812F1 Homo sapiens cDNA, 5′ end | |
| length = 959 | |
| ctggcggcggcggccactctaaccagcgcaaaatgtccctggaacaggaggaggaaacgc | SEQ ID NO: 196 |
| aacctgggcggctcctaggacgcagagacgccgtccccgccttcattgagcccaacgtgc | |
| gcttctggatcaccgagcgccaatcctttattcgacgatttcttcaatggacagaattat | |
| tagatcctacaaatgtgttcatttcagttgaaagtatagaaaactcgaggcaactattgt | |
| gcacaaatgaagatgtttccagccctgcctcggcggaccaaaggatacaagaagcttgga | |
| agcggagtcttgcaacagtgcatcccgacagcagcaacctgatccccaagctttttcgac | |
| ctgcagcgttcctgcctttcatggcgcccacggtatttttgtcaatgacgccactgaaag | |
| ggatcaagtccgtgattttacctcaggttttcctctgtgcctacatggcagcgttcaaca | |
| gcatcaatggaaacagaagttacacttgtaagccactagaaagatcattactaatggcgg | |
| gagccgttgcttcttcaactttcttaggagtaatccctcagtttgtccagatgaagtatg | |
| gcctgactggcccttggattaaaagactcttacctgtgatcttcctcgtgcaagccagtg | |
| gaatgaatgtctacatgtcccgaagtcttgaatccattaaggggattgcggtcatggaca | |
| aggaaggcattgtcctgggtcattcccagaattgctgggacaaaggctgttagagaaaac | |
| gctagccatccagaaatagtgcatgtttgggaccctcagttcttgattcctgaagttctt | |
| caacctaactttttaaaaggacccagtatttcaggaaaaacccaggtcatgtggatttga | |
| aactgtcttgtaactgtcctggcatggaactgatggtggcatttcttttaatttttcaa | |

[0327] TABLE 206

| | |
|---|---|
| cbe_71919 FLJ13236 | |
| hypothetical protein FLJ13236 | |
| length = 1854 | |
| ctccaaccctctgctcccgtttctccctctggttcatagcccgcgggacagagcagccct | SEQ ID NO: 197 |
| ggattgggaggctcctcaggtctcaggctcaggtgcagaagcagagcccctaactggaag | |
| gctcggaggtgggccggtgaggcaagcaagccctgtggggggttgaggacagcttgggtt | |
| ggatgtccctcactgcagcctgtccgtggatgtctctgccttaagggaattggaggtgga | |
| accatccagtcttgaaggtcaacggagcgtgaagagaggagcgtgcagcttgagggtcta | |
| aggataactctggggccatgacagccatgagtctcacagaggaccccgagacttctgtgc | |
| tgcgagtaaccggacttgttctgagacctttgccctagaggatggccaaggggctcctgg | |
| tgacctatgccctctgggctgtggggggccctgctgggctccaccacctgtacctgggaa | |
| gggacagccacgccctgctctggatgctgaccctggggggaggtgggctgggctggctct | |
| gggagttctggaagctcccaagctttgtagctcaggccaacagagcccagggacagaggc | |
| agagccccagaggggtgacaccccctctgagtcccattcgctttgctgcccaggtgatag | |
| ttggcatctattttggccttgtggcactgattagcctttcttccatggtcaacttctata | |
| ttgtggccctcccactggcagttggcttaggggtcttgctggtggctgctgttggcaacc | |
| agacctcagactttaagaacactctggggtcagcatttctcacttcacctatcttctatg | |
| gccgccccatagccatactgcccattagcgtggccgccagcattacagctcagaggcatc | |
| gccgctacaaagctttggtggcatcagagccgctcagtgtgcggctctatcgtctgggct | |
| tggcttaccttgctttcacaggcccactggcatacagtgccctctgcaacacagctgcca | |
| ccctcagctatgtggcagaaacctttggctccttcttgaattggttcagcttcttccccc | |
| ttcttggccgcctcatggagtttgtcctccttctgccttaccggatctggaggctactga | |
| tgggggagactggcttcaacagcagctgctttcaggagtgggcgaagctctatgagtttg | |
| ttcacagttttcaggatgagaagcgtcagctggcttaccaggttttgggcctctcagaag | |
| gggcaacaaatgaagaaatacatcggagttaccaggagctagtgaaggtctggcacccag | |
| accacaacctggaccagacagaggaggcacagaggcacttcctggagatccaggctgcgt | |
| atgaagtcctgagtcaacccaggaagccctggggatcccggaggtgaaaagaaacttccc | |
| cctgaggactgactcttcctagcagagctgggcaacttgtcccaaatctagctttgccca | |
| cgaatggcatcccaacagagttaaagaaactgcttgcaggggctgggcgtggtggctcat | |
| gcctgtaatcccggcactttgggaggccgaggcgggcagatcacgaggtcaggagttcga | |
| gaccagcagcctggcdaatatggtgaaacttcgtctctactaaaaatacaaaaaattggc | |
| caggagtggtggcaggcacctgtagtcccagctacttgggaggctgaggcaggagaatca | |
| cctgaacctgagaggcggaggttgcagtgagccgagatcacgccactgcactccagcctg | |
| ggcaacaagagtgaaactccgtctcaaaaaaaaaaaaaaaaaaaaaaaaaaaaa | |

[0328] TABLE 207

| | |
|---|---|
| cbe_92628 FTHP1 | |
| ferritin, heavy polypeptide pseudogene 1 | |
| length = 2083 | |
| catcaaaagaatgaagaacataagaaaaggtaactacatcagtaaatatattgctttttt | SEQ ID NO: 198 |
| cttcttatttaaatgctttaaaagagaattgattgtttaaataaaaatatcaatgtaggc | |
| tacatgcagtggctcacacctataatcccagcactttgggaggctgaggtgggtggatca | |
| cttgaggtcagaatgttcaagaccagcctggccaacatggtgatctttgtgtctattaaa | |
| aaatacaaaaataagccaggcgtggtggcgggcacctgtaatccagctactctaaggctg | |
| aggcaagagatcacttgaatccaggaggcagaggctgcagtcagccaaaattactccact | |
| gccctccagcctaggcaacagagtgagaatctgtctcaaaaataaaaataaaaataaatc | |
| aatgtagtatcagacttatatgtagaaattaaatatttgacaaaataacatgaaattata | |
| aggagagaaattaaaatttattattttaaggttcttaatatacaaactagtatattatca | |
| gttgaagatagtctgcaataatttaaagctatatactataaacactaaagcaaccattaa | |
| tatagcaaaattgaaaatatgaagttaatagggcaacaaaggagataaaatgtaatttta | |
| agaaatatacaaataattacaaaaagacagcataatagtaaaagagaatgaacagataaa | |
| acaattataaaacaaacaccaagctgagagacttaaacctaatcacacgataatcacact | |
| aaatgtaaatggtccaaatacccccatcaaaaaggagagactttcaaatagataatgaaa | |
| attcaagacctaaccacaaaaaaaacacacttagaatataaagtcacagatagggtaaaa | |
| gtggaagaatgacaaaagaagagacattcttcaccaagagtcctcggggtttcctgcttc | |
| agcagtgcttggacggaacccggcacttgtcccccacccaggccagctgcccatagccag | |
| ccctccgtcacgtcttcactgcaccctcagaccaccccaaggcccccaccgccgctccag | |
| cgccacgcagccaccgccgccgcagcctctccttagtcattgccatgatgactgcatcca | |
| actcgcaggtgcgccagaactaccaccaggactcagaggccgccatcaaccgccagatca | |
| acctggagctctacgcctcctactttaacctctccatgtcttactactttgaccgtgatg | |
| atgcggctttgaagaactttgccaaatactttcttcaccaatctcatgaggagagggagc | |
| atgctgagaaactgatgaaactgcagaaccaacaaggtggctgaattttccttcaggata | |
| tcaagaaaccagactgatgactgggatagtgggctgaatgtgatagagtgtgcattacat | |
| ttggaaaaaaatgtgaatcagtcactactggaactgcacaaactggccactgacaaaaat | |
| gacccccatttgtgtgacttcattgagacacattacctgaatgagcaggtgaaagccatc | |
| aaagaattgggtgaacgtgaccaacttgcacaagatgggagcacccgaatctggcttggc | |
| agaatatctctttgacaagcacaccctgggagaaagtgataatgaaagctaagcctcagg | |
| ctaatttccccatagctgtggggtgacttccctggtcaccaaggcagtgcatgcatgttg | |
| gggtttcctttaccttttctataagttgtaccaaaacatccacttaagttcttttgattt | |
| gtaccattccttcaaataaagaaatctggtacccccccccaaaaaagaatgacaaaagat | |
| agcacatgtgaatacaaataaaaagtaagctactgtggctacattcatgtcagacaaagt | |
| aaatttcagagtagagaatattaccagtaataaatgattatttcatagtgataaaggggt | |
| caattcatgaaaaagacataatcctaaacctaatacaacagttcaaaataaatgcagcaa | |
| aaactggaaggagaaagaaacagatcctctagagtcgacctgc | |

### Other Embodiments

[0329] Although particular embodiments have been disclosed herein in detail, this has been done by way of example for purposes of illustration only, and is not intended to be limiting with respect to the scope of the appended claims, which follow. In particular, it is contemplated by the inventors that various substitutions, alterations, and modifications may be made to the invention without departing from the spirit and scope of the invention as defined by the claims. The choice of nucleic acid starting material, clone of interest, or library type is believed to be a matter of routine for a person of ordinary skill in the art with knowledge of the embodiments described herein. Other aspects, advantages, and modifications considered to be within the scope of the following claims. The claims presented are representative of the inventions disclosed herein. Other, unclaimed inventions are also contemplated. Applicants reserve the right to pursue such inventions in later claims.

### REFERENCES

[0330] Ahmed, S., J. Lee, et al. (1994). “Breakpoint cluster region gene product-related domain of n-chimaerin. Discrimination between Rac-binding and GTPase-activating residues by mutational analysis.” J Biol Chem 269(26): 17642-8.
[0331] Boonstra, J., P. Rijken, et al. (1995). “The epidermal growth factor.” Cell Biol Int 19(5): 413-30.
[0332] Cannistra, S. A. and J. M. Niloff (1996). “Cancer of the uterine cervix.” N Engl J Med 334(16): 1030-8.
[0333] Dyson, N., P. M. Howley, et al. (1989). “The human papilloma virus-16 E7 oncoprotein is able to bind to the retinoblastoma gene product.” Science 243(4893): 934-7.
[0334] Gillison, M. L. and K. V. Shah (2001). “Human papillomavirus-associated head and neck squamous cell carcinoma: mounting evidence for an etiologic role for human papillomavirus in a subset of head and neck cancers.” Curr Opin Oncol 13(3): 183-8.
[0335] Hwang, E. S., T. Nottoli, et al. (1995). “The HPV16 E5 protein: expression, detection, and stable complex formation with transmembrane proteins in COS cells.” Virology 211(1): 227-33.
[0336] Johnson, C. V., D. E. Cool, et al. (1993). “Isolation and mapping of human T-cell protein tyrosine phosphatase sequences: localization of genes and pseudogenes discriminated using fluorescence hybridization with genomic versus cDNA probes.” Genomics 16(3): 619-29.
[0337] Kiyono, T., S. A. Foster, et al. (1998). “Both Rb/p16INK4a inactivation and telomerase activity are required to immortalize human epithelial cells.” Nature 396(6706): 84-8.
[0338] Koutsky, L. A., K. A. Ault, et al. (2002). “A controlled trial of a human papillomavirus type 16 vaccine.” N Engl J Med 347(21): 1645-51.
[0339] McDougall, J. K. (1994). “Immortalization and transformation of human cells by human papillomavirus.” Curr Top Microbiol Immunol 186: 101-19.
[0340] Munger, K., W. C. Phelps, et al. (1989). “The E6 and E7 genes of the human papillomavirus type 16 together are necessary and sufficient for transformation of primary human keratinocytes.” J Virol 63(10): 4417-21.
[0341] Munoz, N. (2000). “Human papillomavirus and cancer: the epidemiological evidence.” J Clin Virol 19(1-2): 1-5.
[0342] Nicoll, D., S. McPhee, et al. (2001). Pocket Guide to Diagnostic Tests, Lange/McGraw-Hill. Schiffman, M. H., N. B. Kiviat, et al. (1995). “Accuracy and interlaboratory reliability of human papillomavirus DNA testing by hybrid capture.” J Clin Microbiol 33(3): 545-50.
[0343] Takai, Y., T. Sasaki, et al. (2001). “Small GTP-binding proteins.” Physiol Rev 81(1): 153-208.
[0344] Tindle, R. W. (2002). “Immune evasion in human papillomavirus-associated cervical cancer.” Nature Rev Cancer 2(1): 59-65.
[0345] Walboomers, J. M., M. V. Jacobs, et al. (1999). “Human papillomavirus is a necessary cause of invasive cervical cancer worldwide.” J Pathol 189(1): 12-9.
[0346] Werness, B. A., A. J. Levine, et al. (1990). “Association of human papillomavirus types 16 and 18 E6 proteins with p53.” Science 248(4951): 76-9.
[0347] Wright, T. C., Jr., J. T. Cox, et al. (2002). “2001 Consensus Guidelines for the management of women with cervical cytological abnormalities.” Jama 287(16): 2120-9.
[0348] zur Hausen, H. (1996). “Papillomavirus infections—a major cause of human cancers.” Biochim Biophys Acta 1288(2): F55-78.
[0349] zur Hausen, H. (2002). “Papillomaviruses and cancer: from basic studies to clinical application.” Nat Rev Cancer 2(5): 342-50.

1. A purified complex comprising a first polypeptide and a second polypeptide, wherein said first polypeptide comprises an amino acid sequence of a polypeptide selected from the group consisting of the polypeptides recited in Table 1 through 7, column 2, and wherein said second polypeptide comprises an amino acid sequence of the corresponding polypeptide recited in Tables 1 through 7, column 5, wherein said first polypeptide binds said second polypeptide.

2. The complex of claim 1, wherein said first polypeptide is labeled with a detectable substance.

3. The complex of claim 1, wherein said second polypeptide is labeled is labeled with a detectable substance.

4. A chimeric polypeptide comprising six or more amino acids of the first polypeptide of claim 1 covalently linked to six or more amino acids of the second polypeptide of claim 1.

5. A nucleic acid encoding the chimeric polypeptide of claim 4.

6. A vector comprising the nucleic acid of claim 5.

7. A cell comprising the vector of claim 8.

8. An antibody which specifically binds the complex of claim 1.

9. The antibody of claim 8, wherein said antibody binds to the complex of claim 1 with higher affinity than it binds to said first or second polypeptide when said polypeptides are not complexed.

10. A pharmaceutical composition comprising the complex of claim 1.

11. A kit comprising a reagent which can specifically detect the complex of claim 1.

12. The kit of claim 11, wherein said reagent is selected from the group consisting of an antibody specific for said complex, an antibody specific for said first polypeptide, and an antibody specific for said second polypeptide.

13. A method of identifying an agent which disrupts a polypeptide complex, the method comprising:
(a) providing the complex of claim 1;
(b) contacting the complex with a test agent; and
(c) detecting the presence of a polypeptide displaced from said complex, wherein the presence of displaced polypeptide indicates said agent disrupts said complex.

14. A method for identifying an agent which disrupts a polypeptide complex comprising at least one HPV-associated protein or HPV interactor protein, the method comprising:
(a) providing the complex of claim 1;
(b) contacting said complex with a test agent; and
(c) detecting the presence of a polypeptide displaced from said complex, wherein the presence of displaced polypeptide indicates said agent disrupts said complex.

15. A method of identifying a polypeptide complex in a subject, the method comprising:
(a) providing a biological sample from said subject; and
(b) detecting, if present, the polypeptide complex of claim 1 in said sample, thereby identifying said complex.

16. A method of detecting a polypeptide in a biological sample, the method comprising:
(a) providing a biological sample comprising the first polypeptide of claim 1;
(b) contacting said biological sample with the second polypeptide of claim 1 under conditions suitable for formation of a complex comprising said first and second polypeptides; and
(c) detecting the presence of a complex of said first and second polypeptide, wherein the presence of said complex indicates the presence of said first polypeptide in said sample.

17. A method of detecting a polypeptide in a biological sample, the method comprising:
(a) providing a biological sample comprising the second polypeptide of claim 1;
(b) contacting said biological sample with the first polypeptide of claim 1 under conditions suitable for formation of a complex comprising said first and second polypeptides; and
(c) detecting the presence of a complex of said first and second polypeptide, wherein the presence of said complex indicates the presence of said second polypeptide in said sample.

18. A method of removing a polypeptide from a biological sample, the method comprising:
(a) providing a biological sample comprising the first polypeptide of claim 1;
(b) contacting said biological sample with the second polypeptide of claim 1 under conditions suitable for formation of a complex comprising said first and second polypeptide; and
(c) removing said complex from said sample, thereby removing said first polypeptide from said sample.

19. A method of determining altered expression of a polypeptide in a subject, the method comprising:
(a) providing a biological sample from said subject,
(b) measuring the level of the complex of claim 1 in said sample; and
(c) comparing the level of said complex from step (b) to the level of said complex in a reference sample whose level of the complex of claim 1 is known, thereby determining whether said subject has altered expression of said first or second polypeptide.

20. A method of treating or preventing a disease or disorder involving altered levels of the complex of claim 1, the method comprising:
administering a therapeutically-effective amount of least one molecule that modulates the function of said complex to a subject in need thereof.

21. A method of screening for pre-cancerous cervical lesions comprising contacting a patient derived cervical cell with a molecule that binds specifically to HPV E6 or E7 protein, detecting binding of said molecule, thereby identifying pre-cancerous cervical lesions.

22. The method of claim 21, wherein said E6 or E7 protein are proteins from HPV types selected from the group consisting of HPV 1a, HPV 11 and HPV 16.

23. A method of classifying an HPV infection in a patient, comprising contacting a patient derived cell with a molecule that binds specifically to a subset of HPV E6 or E7 proteins, said molecule selected from a keratinocyte library, detecting binding of said molecule thereby classifying an HPV infection in said patient.

24. The method of claim 23, wherein the cell is obtained from the site of HPV infection.

25. The method of claim 23, wherein the cell is selected from head, neck, larynx, skin, anogenital, epithelial, mucosal or cervical tissue.

The application's sequence listing, which the Patent Office published only in electronic form, follows.

SEQUENCE LISTING (198 sequences)

SEQ ID NO: 1 - protein, 211 aa, Homo sapiens [sequence omitted]

SEQ ID NO: 2 - protein, 776 aa, Homo sapiens [sequence omitted]

SEQ ID NO: 3 - protein, 319 aa, Homo sapiens
MGWRRKRVPQRGRKAPPPQLHGNINNLYFPIRWRDRLHWDSPNPAAECQRHEVTLVSRKPGPGRITWDELAASGLPSCDAAVNLAGENILNPLRRWNETFQKEVLGSRLETTQLLAKAITKAPQPPKAWVLVTGVAYYQPSLTAEYDEDSPGGDFDFFSNLVTKWEAAARLPGDSTRQVVVRSGVVLGRGGGAMGHMLLPFRLGLGGPIGSGHQFFPWIHIGDLAGILTHALEANHVHGVLNGVAPSSATNAEFAQTLGAALGRRAFIPLPSAVVQAVFGRQRAIMLLEGQKVIPQRTLATGYQYSFPELGAALKEIVA

SEQ ID NO: 4 - protein, 93 aa, Homo sapiens
MGREFGNLTRMRHVISYSLSPFEQRAYPHVFTKGIPNVLRRIRESFFRVVPQFVVFYLIYTWGTEEFERSKRRIQLPMKMTNEQRIRMTVPCL

SEQ ID NO: 5 - protein, 1225 aa, Homo sapiens
MFARKPPGAAPLGAMPVPDQPSSASEKTSSLSPGLNTSNGDGSETETTSAILASVKEQELQFERLTRELEAERQIVASQLERCKLGSETGSMSSMSSAEEQFQWQSQDGQKDIEDELTTGLELVDSCIRSLQESGILDPQDYSTGERPSLLSQSALQLNSKPEGSFQYPASYHSNQTLALGETTPSQLPARGTQARATGQSFSQGTTSRAGHLAGPEPAPPPPPPPREPFAPSLGSAFHLPDAPPAAAAAALYYSSSTLPAPPRGGSPLAAPQGGSPTKLQRGGSAPEGATYAAPRGSSPKQSPSRLAKSYSTSSPINIVVSSAGLSPIRVTSPPTVQSTISSSPIHQLSSTIGTYATLSPTKRLVHASEQYSKHSQELYATATLQRPGSLAAGSRASYSSQHGHLGPELRALQSPEHHIDPIYEDRVYQKPPMRSLSQSQGDPLPPAHTGTYRTSTAPSSPGVDSVPLQRTGSQHGPQNAAAATFQRASYAAGPASNYADPYRQLQYCPSVESPYSKSGPALPPEGTLARSPSIDSIQKDPREFGWRDPELPEVIQMLQHQFPSVQSNAAAYLQHLCFGDNKIKAEIRRQGGIQLLVDLLDHRMTEVHRSACGALRNLVYGKANDDNKIALKNCGGIPALVRLLRKTTDLEIRELVTGVLWNLSSCDALKMPIIQDALAVLTNAVIIPHSGWENSPLQDDRKIQLHSSQVLRNATGCLRNVSSAGEEARRRMRECDGLTDALLYVIQSALGSSEIDSKTVENCVCILRNLSYRLAAETSQGQHMGTDELDGLLCGEANGKDAESSGCWGKKKKKKKSQDQWDGVGPLPDCAEPPKGIQMLWHPSIVKPYLTLLSECSNPDTLEGAAGALQNLAAGSWKWSVYIRAAVRKEKGLPILVELLRIDNDRVVCAVATALRNMALDVRNKELIGKYAMRDLVHRLPGGNNSNNTASKAMSDDTVTAVCCTLHEVITKNMENAKALRDAGGIEKLVGISKSKGDKHSPKVVKAASQVLNSMWQYRDLRSLYKKDGWSQYHFVASSSTIERDRQRPYSSSRTPSISPVRVSPNNRSASAPASPREMISLKERKTDYECTGSNATYHGAKGEHTSRKDAMTAQNTGISTLYRNSYGAPAEDIKHNQVSAQPVPQEPSRKDYETYQPFQNSTRNYDESFFEDQVHHRPPASEYTMHLGLKSTGNYVDFYSAARPYSELNYETSHYPASPDSWV

SEQ ID NO: 6 - protein, 158 aa, Homo sapiens
MRGIYSSSVYLEEISSIISKMPKADFYVLEKTGLSIQNSSLFPILLHFHIMEAMLYALLNKTFAQDGQHQVLSMNRNAVGKHFELMIGDSRTSGKELVKQFLFDSILKADPRVFFPSDKIVHYRQMFLSTELQRVEELYDSLLQAIAFYELAVFDSQP

SEQ ID NO: 7 - protein, 24 aa, Homo sapiens
MHYSPDASTAFSSIAHITRDVNYG

SEQ ID NO: 8 - protein, 189 aa, Homo sapiens
MAAGRLFLSRLRAPFSSMAKSPLEGVSSSRGLHAGRGPRRLSIEGNIAVGKSTFVKLLTKTYPEWHVATEPVATWQNIQAAGTQKACTAQSLGNLLDMMYREPARWSYTFQTFSFLSRLKVQLEPFPEKLLQARKPVQIFERSVYSDRLHFEALMNIPVLVLDVNDDFSEEVTKQEDLMREVNTFVKNL

SEQ ID NO: 9 - protein, 108 aa, Homo sapiens
MVVPIIGKYVMAAQLYVLLHLYLALYEKYPLLNLLHTPPHRPPPLQCPPAPRKTACRRRLGSEHVDRPLTTPCVWPTSDPWTVQSTTSSLTITTSTKEGTTVTVQLRL

SEQ ID NO: 10 - protein, 367 aa, Homo sapiens
MEAIAKRLDACQDQLLELYEENSIDIHKHIMHWKCIRLESVLLHKAKQMGLSHIGLQVVPPLTVSETKGHNAIEMQMHLESLAKTQYGVEPWTLQDTSYEMWLTPPKRCFKKQGNTVEVKFDGCEDNVMEYVVWTHIYLQDNDSWVKVTSSVDAKGIYYTCGQFKTYYVNFNKEAQKYGSTNHWEVCYGSTVICSPASVSSTVREVSIAEPTTYTPAQTTAPTVSACTTEDGVSAPPRKRARGPSTNNTLCVANIRSVDSTINNIVTDNYNKHQRRNNCHSAATPIVQLQGDSNCLKCFRYRLNDKYKHLFELASSTWHWASPEAPHKNAIVTLTYSSEEQRQQFLNSVKIPPTIRHKVGFMSLHLL

SEQ ID NO: 11 - protein, 150 aa, Homo sapiens
MESKDASTSATSIDQLCKTFNLSLHTLQIQCVFCRNALTTAEIYAYAYKNLKVVWRDNFPFAACACCLELQGKINQYRHFNYAAYAPTVEEETNEDILKVLIRCYLCHKPLCEIEKLKHILGKARFIKLNNQWKGRCLHCWTTCMEDLLP

SEQ ID NO: 12 - protein, 98 aa, Homo sapiens
MHGRLVTLKDIVLDLQPPDPVGLHCYEQLEDSSEDEVDKVDKQDAQPLTQHYQILTCCCGCDSNVRLVVECTDGDIRQLQDLLLGTLNIVCPICAPKP

SEQ ID NO: 13 - protein, 92 aa, Homo sapiens
MADPAAATKYPLLKLLGSTWPTTPPRPIPKPSPWAPKKHRRLSSDQDQSQTPETPATPLSCCTETQWTVLQSSLHLTAHTKDGLTVIVTLHP

SEQ ID NO: 14 - protein, 649 aa, Homo sapiens
MADPAGTNGEEGTGCNGWFYVEAVVEKKTGDAISDDENENDSDTGEDLVDFIVNDNDYLTQAETETAHALFTAQEAKQHRDAVQVLKRKYLGSPLSDISGCVDNNISPRLKAICIEKQSRAAKRRLFESEDSGYGNTEVETQQMLQVEGRHETETPCSQYSGGSGGGCSQYSSGSGGEGVSERHTICQTPLTNILNVLKTSNAKAAMLAKFKELYGVSFSELVRPFKSNKSTCCDWCIAAFGLTPSIADSIKTLLQQYCLYLHIQSLACSWGMVVLLLVRYKCGKNRETIEKLLSKLLCVSPMCMMIEPPKLRSTAAALYWYKTGISNISEVYGDTPEWIQRQTVLQHSFNDCTFELSQMVQWAYDNDIVDDSEIAYKYAQLADTNSNASAFLKSNSQAKIVKDCATMCRHYKRAEKKQMSMSQWIKYRCDRVDDGGDWKQIVMFLRYQGVEFMSFLTALKRFLQGIPKKNCILLYGAANTGKSLFGMSLMKFLQGSVICFVNSKSHFWLQPLADAKIGMLDDATVPCWNYIDDNLRNALDGNLVSMDVKHRPLVQLKCPPLLITSNINAGTDSRWPYLHNRLVVFTFPNEFPFDENGNPVYELNDKNWKSFFSRTWSRLSLHEDEDKENDGDSLPTFKCVSGQNTNTL

SEQ ID NO: 15 - protein, 365 aa, Homo sapiens
METLCQRLNVCQDKILTHYENDSTDLRDHIDYWKHMRLECAIYYKAREMGFKHINHQVVPTLAVSKNKALQAIELQLTLETIYNSQYSNEKWTLQDVSLEVYLTAPTGCIKKHGYTVEVQFDGDICNTMHYTNWTHIYICEEASVTVVEGQVDYYGLYYVHEGIRTYFVQFKDDAEKYSKNKVWEVHAGGQVILCPTSVFSSNEVSSPEIIRQHLANHPAATHTKAVALGTEETQTTIQRPRSEPDTGNPCHTTKLLHRDSVDSAPILTAFNSSHKGRINCNSNTTPIVHLKGDANTLKCLRYRFKKHCTLYTAVSSTWHWTGHNVKHKSAIVTLTYDSEWQRDQFLSQVKIPKTITVSTGFMSI

SEQ ID NO: 16 - protein, 158 aa, Homo sapiens
MHQKRTAMFQDPQERPRKLPQLCTELQTTIHDIILECVYCKQQLLRREVYDFAFRDLCIVYRDGNPYAVCDKCLKFYSKISEYRHYCYSLYGTTLEQQYNKPLCDLLIRCINCQKPLCPEEKQRHLDKKQRFHNIRGRWTGRCMSCCRSSRTRRETQL

SEQ ID NO: 17 - protein, 98 aa, Homo sapiens
MHGDTPTLHEYMLDLQPETTDLYCYEQLNDSSEEEDEIDGPAGQAEPDRAHYNIVTFCCKCDSTLRLCVQSTHVDIRTLEDLLMGTLGIVCPICSQKP

SEQ ID NO: 18 - protein, 649 aa, Homo sapiens
MADDSGTENEGSGCTGWFMVEAIVEHTTGTQISEDEEEEVEDSGYDMVDFIDDRHITQNSVEAQALFNRQEADAHYATVQDLKRKYLGSPYVSPISNVANAVESEISPRLDAIKLTTQPKKVKRRLFETRELTDSGYGYSEVEAATQVEKHGDPENGGDGQERDTGRDIEGEGVEHREAEAVDDSTREHADTSGILELLKCKDIRSTLHGKFKDCFGLSFVDLIRPFKSDRTTCADWVVAGFGIHHSIADAFQKLIEPLSLYAHIQWLTNAWGMVLLVLIRFKVNKSRCTVARTLGTLLNIPENHMLIEPPKIQSGVRALYWFRTGISNASTVIGEAPEWITRQTVIEHSLADSQFKLTEMVQWAYDNDICEESEIAFEYAQRGDFDSNARAFLNSNMQAKYVKDCAIMCRHYKHAEMKKMSIKQWIKYRGTKVDSVGNWKPIVQFLRHQNIEFIPFLSKLKLWLHGTPKKNCIAIVGPPDTGKSCFCMSLIKFLGGTVISYVNSCSHFWLQPLTDAKVALLDDATQPCWTYMDTYMRNLLDGNPMSIDRKHRALTLIKCPPLLVTSNIDISKEEKYKYLHSRVTTFTFPNPFPFDRNGNAVYELSDANWKCFFERLSSSLDIEDSEDEEDGSNSQAFRCVPGSVVRTL

SEQ ID NO: 19 - protein, 473 aa, Homo sapiens
MRHKRSAKRTKRASATQLYKTCKQAGTCPPDIIPKVEGKTIAVQILQYGSMGVFFGGLGIGTGSGTGGRTGYIPLGTRPPTATDTLAPVRPPLTVDPVGPSDPSIVSLVEETSFIDAGAPTSVPSIPPDVSGFSITTSTDTTPAILDINNTVTTVTTHNNPTFTDPSVLQPPTPAETGGHFTLSSSTISTHNYEEIPMDTFIVSTNPNTVTSSTPIPGSRPVARLGLYSRTTQQVKVVDPAFVTTPTKLITYDNPAYEGIDVDNTLYFSSNDNSINIAPDPDFLDIVALHRPALTSRRTGIRYSRIGNKQTLRTRSGKSIGAKVHYYYDLSTIDPAEEIELQTITPSTYTTTSHAASPTSINNGLYDIYADDFITDTSTTPVPSVPSTSLSGYIPANTTIPFGGAYNIPLVSGPDIPINITDQAPSLIPIVPGSPQYTIIADAGDFYLHPSYYMLRKRRKRLPYFFSDVSLAA

SEQ ID NO: 20 - protein, 125 aa, Homo sapiens
MADNKAPQGLLGLLQYTPTTQPYPRVTPPSNRRPSTTPNSQDRGRPRRSDKDSRKHLYADGLTDGEDPEVPEVEDEEKENQRPLGHPDLSLLRETLEVYTQRLKRDILQDLDDFCRKLGIHPWSV

SEQ ID NO: 21 - protein, 531 aa, Homo sapiens
MQVTFIYILVITCYENDVNVYHIFFQMSLWLPSEATVYLPPVPVSKVVSTDEYVARTNIYYHAGTSRLLAVGHPYFPIKKPNNNKILVPKVSGLQYRVFRIHLPDPNKFGFPDTSFYNPDTQRLVWACVGVEVGRGQPLGVGISGHPLLNKLDDTENASAYAANAGVDNRECISMDYKQTQLCLIGCKPPIGEHWGKGSPCTNVAVNPGDCPPLELINTVIQDGDMVHTGFGAMDFTTLQANKSEVPLDICTSICKYPDYIKMVSEPYGDSLFFYLRREQMFVRHLFNRAGTVGENVPDDLYIKGSGSTANLASSNYFPTPSGSMVTSDAQIFNKPYWLQRAQGHNNGICWGNQLFVTVVDTTRSTNMSLCAAISTSETTYKNTNFKEYLRHGEEYDLQFIFQLCKITLTADVMTYIHSMNSTILEDWNFGLQPPPGGTLEDTYRFVTQAIACQKHTPPAPKEDDPLKKYTFWEVNLKEKFSADLDQFPLGRKFLLQAGLKAKPKFTLGKRKATPTTSSTSTTAKRKKRKL

SEQ ID NO: 22 - protein, 401 aa, Homo sapiens
MENLSSRLDLLQEQLMNLYEQDSKLIEDQIKQWNLIRQEQVLFHFARKNGVMRIGLQAVPSLASSQEKAKTAIEMVLHLESLKDSPYGTEDWSLQDTSRELFLAPPAGTFKKSGSTLEVTYDNNPDNQTRHTIWNHVYYQNGDDVWRKVSSGVDAVGVYYLEHDGYKNYYVLFAEEASKYSTTGQYAVNYRGKRFTNVMSSTSSPRAAGAPAVHSDYPTLSESDTAQQSTSIDYTELPGQGETSQVRQRQQKTPVRRRPYGRRRSRSPRGGGRREGESTPSRTPGSVPSARDVGSIHTTPQKGHSSRLRRLLQEAWDPPVVCVKGGANQLKCLRYRLKASTQVDFDSISTTWHWTDRKNTERIGSARMLVKFIDEAQREKFLERVALPRSVSVFLGQFNGS

SEQ ID NO: 23 - protein, 140 aa, Homo sapiens
MATPIRTVRQLSESLCIPYIDVLLPCNFCNYFLSNAEKLLFDHFDLHLVWRDNLVFGCCQGCARTVSLLEFVLYYQESYEVPEIEEILDRPLLQIELRCVTCIKKLSVAEKLEVVSNGERVHRVRNRLKAKCSLCRLYAI

SEQ ID NO: 24 - protein, 93 aa, Homo sapiens
MVGEMPALKDLVLQLEPSVLDLDLYCYEEVPPDDIEEELVSPQQPYAVVASCAYCEKLVRLTVLADHSAIRQLEELLLRSLNIVCPLCTLQRQ

SEQ ID NO: 25 - protein, 234 aa, Homo sapiens
MNPVPHWGEVFLLVGGEGEHLASQGTTPARDHRVGISPASQQAQPESWRRRQRDKGVDPEKAPSLTRQSQNPPSLTAPLGMPSACSCLPCGPAPEAAIILAGPPTALTVLPKGTGLKKSKRLLLESLMRRRIAHLKWGLPRRILESYFLFNFLGSCSLTLAGARLSGLNTGQELQAQQERYCEAQGSPPGLKSPERFQRVQRPDRKSSKLPIQARALERNRPHMSEPIKHFHPA

SEQ ID NO: 26 - protein, 508 aa, Homo sapiens
MYNVFQMAVWLPAQNKFYLPPQPITRILSTDEYVTRTNLFYHATSERLLLVGHPLFEISSNQTVTIPKVSPNAFRVFRVRFADPNRFAFGDKAIFNPETERLVWGLRGIEIGRGQPLGIGITGHPLLNKLDDAENPTNYINTHANGDSRQNTAFDAKQTQMFLVGCTPASGEHWTSSRCPGEQVKLGDCPRVQMIESVIEDGDMMDIGFGAMDFAALQQDKSDVPLDVVQATCKYPDYIRMNHEAYGNSMFFFARREQMYTRHFFTRGGSVGDKEAVPQSLYLTADAEPRTTLATTNYVGTPSGSMVSSDVQLFNRSYWLQRCQGQNNGICWRNQLFITVGDNTRGTSLSISMKNNASTTYSNANFNDFLRHTEEFDLSFIVQLCKVKLTPENLAYIHTMDPNILEDWQLSVSQPPTNPLEDQYRFLGSSLAAKCPEQAPPEPQTDPYSQYKFWEVDLTERMSEQLDQFPLGRKFLYQSGMTQRTATSSTTKRKTVRVSTSAKRRRKA

SEQ ID NO: 27 - protein, 507 aa, Homo sapiens
MYRLRRKRAAPKDIYPSCKISNTCPPDIQNKIEHTTIADKILQYGSLGVFLGGLGIGTARGSGGRIGYTPLGEGGGVRVATRPTPVRPTIPVETVGPSEIFPIDVVDPTGPAVIPLQDLGRDFPIPTVQVIAEIHPISDIPNIVASSTNEGESAILDVLRGNATIRTVSRTQYNNPSFTVASTSNISAGEASTSDIVFVSNGSGDRVVGEDIPLVELNLGLETDTSSVVQETAFSSSTPIAERPSFRPSRFYNRRLYEQVQVQDPRFVEQPQSMVTFDNPAFEPELDEVSIIFQRDLDALAQTPVPEFRDVVYLSKPTFSREPGGRLRVSRLGKSSTIRTRLGTAIGARTHFFYDLSSIAPEDSIELLPLGEHSQTTVISSNLGDTAFIQGETAEDDLEVISLETPQLYSEEELLDTNESVGENLQLTITNSEGEVSILDLTQSRVRPPFGTEDTSLHVYYPNSSKGTPIINPEESFTPLVIIALNNSTGDFELHPSLRKRRKRAYV

SEQ ID NO: 28 - protein, 361 aa, Artificial Sequence
  Description of Artifical Sequence:  Domain
AICLDYFTDPVSIGCGHNFCRVCVTQLWGGEDEEDRDELDREEEEEDGEEEEVEAVGAGAGWDTPMRDEDYEGDMEEEVEEEEEGVFWTSGMSRSSWDNMDYVWEEEDEEEDLDYYLGDMEEEDLRGEDEEDEEEVLEEVEEEDLDPVTPLPPPPAPRRCFTCPQCRKSFPRRSFRPNLQLANMVQVIRQMHPTPGRGSRVTDQGICPKHQEALKLFCEVDEEAICVVCRESRSHKQHSVVPLEEVVQEYKAKLQGHVEPLRKHLEAVQKMKAKEERRVTELKSQMKSELAAVASEFGRLTRFLAEEQAGLERRLREMHEAQLGRAGAAASRLAEQAAQLSRLLAEAQERSQQGGLRLLQV

SEQ ID NO: 29 - protein, 165 aa, Homo sapiens
MLMPKKNRIAIYELLFKEGVMVAKKDVHMPKHPELADKNVPNLHVMKAMQSLKSRGYVKEQFAWRHFYWYLTNEGIQYLRDYLHLPPEIVPATLRRSRPETGRPRPKGLEGERPARLTRGEADRDTYRRSAVPPGADKKAEAGAGSATEFQFRGGFGRGRGQPPQ

SEQ ID NO: 30 - protein, 20 aa, Homo sapiens
MQLKTLSLATPPRETAVINL

SEQ ID NO: 31 - protein, 325 aa, Homo sapiens
MPITRMRMRPWLEMQINSNQIPGLIWINKEEMIFQIPWKHAAKHGWDINKDACLFRSWAIHTGRYKAGEKEPDPKTWKANFRCAMNSLPDIEEVKDQSRNKGSSAVRVYRMLPPLTKNQRKERKSKSSRDAKSKAKRKSCGDSSPDTFSDGLSSSTLPDDHSSYTVPGYMQDLEVEQALTPALSPCAVSSTLPDWHIPVEVVPDSTSDLYNFQVSPMPSTSEATTDEDEEGKLPEDIMKLLEQSEWQPTNVDGKGYLLNEPGVQPTSVYGDFSCKEEPEIDSPGGDIGLSLQRVFTDLKNMDATWLDSLLTPVRLPSIQAIPCAP

SEQ ID NO: 32 - protein, 1804 aa, Homo sapiens
MTSLKRSQTERPLATDRASVVGTDGTPKVHTDDFYMRRFRSQNGSLGSSVMAPVGPPRSEGSHHITSTPGVPKMGVRARIADWPPRKENIKESSRSSQEIETSSCLDSLSSKSSPVSQGSSVSLNSNDSAMLKSIQNTLKNKTRPSENMDSRFLMPEAYPSSPRKALRRIRQRSNSDITISELDVDSFDECISPTYKTGPSLHREYGSTSSIDKQGTSGESFFDLLKGYKDDKSDRGPTPTKLSDFLITGGGKGSGFSLDVIDGPISQRENLRLFKEREKPLKRRSKSETGDSSIFRKLRNAKGEELGKSSDLEDNRSEDSVRPWTCPKCFAHYDVQSILFDLNEAIMNRHNVIKRRNTTTGASAAAVASLVSGPLSHSASFSSPMGSTEDLNSKGSLSMDQGDDKSNELVMSCPYFRNEIGGEGERKISLSKSNSGSFSGCESASFESTLSSHCTNAGVAVLEVPKENLVLHLDRVKRYIVEHVDLGAYYYRKFFYQKEHWNYFGADENLGPVAVSIRREKPDEMKENGSPYNYRIIFRTSELMTLRGSVLEDAIPSTAKHSTARGLPLKEVLEHVVPELNVQCLRLAFNTPKVTEQLMKLDEQGLNYQQKVGIMYCKAGQSTEEEMYNNESAGPAFEEFLQLLGERVRLKGFEKYRAQLDTKTDSTGTHSLYTTYKDYEIMFHVSTMLPYTPNNKQQLLRKRHIGNDIVTIVFQEPGAQPFSPKNIRSHFQHVFVIVRVHNPCSDSVCYSVAVTRSRDVPSFGPPIPKGVTFPKSNVFRDFLLAKVINAENAAHKSEKFRAMATRTRQEYLKDLAEKNVTNTPIDPSGKFPFISLASKKKEKSKPYPGAELSSMGAIVWAVRAEDYNKAMELDCLLGISNEFIVLIEQETKSVVFNCSCRDVIGWTSTDTSLKIFYERGECVSVGSFINIEEIKEIVKRLQFVSKGCESVEMTLRRNGLGQLGFHVNYEGIVADVEPYGYAWQAGLRQGSRLVEICKVAVATLSHEQMIDLLRTSVTVKVVIIPPHDDCTPRRSCSETYRMPVMEYKMNEGVSYEFKFPFRNNNKWQRNASKGPHSPQVPSQVQSPMTSRLNAGKGDGKMPPPERAANIPRSISSDGRPLERRLSPGSDIYVTVSSMALARSQCRNSPSNLSSSSDTGSVGGTYRQKSMPEGFGVSRRSPASIDRQNTQSDIGGSGKSTPSWQRSEDSIADQMAYSYRGPQDFNSFVLEQHEYTEPTCHLPAVSKVLPAFRESPSGRLMRQDPVVHLSPNKQGHSDSHYSSHSSSNTLSSNASSAHSDEKWYDGDRTESELNSYNYLQGTSADSGIDTTSYGPSHGSTASLGAATSSPRSGPGKEKVAPLWHSSSEVISMADRTLETESHGLDRKTESSLSLDIHSKSQAGSTPLTRENSTFSINDAASHTSTMSSRHSASPVVFTSARSSPKEELHPAAPSQLAPSFSSSSSSSSGPRSFYPRQGATSKYLIGWKKPEGTINSVGFMDTRKRHQSDGNEIAHTRLRASTRDLRASPKPTSKSTIEEDLKKLIDLESPTPESQKSFKFHALSSPQSPFPSTPTSRRALHRTLSDESIYNSQREHFFTSRASLLDQALPNDVLFSSTYPSLPKSLPLRRPSYTLGMKSLHGEFSASDSSLTDIQETRRQPMPDPGLMPLPDTAADLDWSNLVDAAKAYEVQRASFFAASDENHRPLSAASNSDQLEDQALAQMKPYSSSKDSSPTLASKVDQLEGMLKMLREDLKKEKEDKAHLQAEVQHLREDNLRLQEESQNASDKLKKFTEWVFNTIDMS

SEQ ID NO: 33 - protein, 469 aa, Homo sapiens
MPIRALCTICSDFFDHSRDVAAIHCGHTFHLQCLIQSFETAPSRTCPQCRIQVGKRTIINKLFFDLAQEEENVLDREFLKNELDNVRAQLSQKDKEKRDSQVIIDTLRDTLEERNATVVSLQQALGKAEMLCSTLKKQMKYLEQQQDETKQAQEEAGRLRSKMKTMEQIELLLQSQLPEVEEMIRDMGVGQSAVEQLAVYCVSLKKEYENLKEARKASGEVADKLRKDLFSSRSKLQTVYSELDQAKLELKSAQKDLQSADKEIMSLKKKLTMLQETLNLPPVASETVDRLVLESPAPVEVNLKLRRPSFRDDIDLNATFDVDTPPARPSSSQHGYYEKLCLEKSHSPIQDVPKKICKGPRKESQLSLGGQSCAGEPDEELVGAFPIFVRNAILGQKQPKRPRSESSCSKDVVRTGFDGLGGRTKFIQPTDTVMIRPLPVKPKTKVKQRVRVKTVPSLFQAKLDTFLWS

SEQ ID NO: 34 - protein, 75 aa, Homo sapiens
MAPEVLPKPRMRGLLARRLRNHMAVAFVLSLGVAALYKFRVADQRKKAYADFYRNYDVMKDFEEMRKAGIFQSVK

SEQ ID NO: 35 - protein, 338 aa, Homo sapiens
MGKKQNRKTGNSKTQSTSPPPKERSSSPATDQSWMENDFDELREEGFRRSNYSELREDIQTKGKEVENFEKNLEECITRITNTEKCLKELMELKTKARELREECRSLRSQCDQLEERVSAMEDEMNEMKQEGKFREKRIKRNEQSLQEIWDYVKRPNLRLIGVPESDAENGTKLENTLQDIIQETFPNLARQANVQIQEIQRTPQRYSSRRATPRHIIVRFTKVEMKEKMLRAAREKGRVTLKGKPIRLTADLSAETLQARREWGPILNILKEKNFQPRISYPAKLSFISEGEIKYFTDKQMLTDFVTSRPALKELLKEALNMERNNRYQPLQNHAKM

SEQ ID NO: 36 - protein, 1408 aa, Homo sapiens
MKAPAVLAPGILVLLFTLVQRSNGECKEALAKSEMNVNMKYQLPNFTAETPIQNVILHEHHIFLGATNYIYVLNEEDLQKVAEYKTGPVLEHPDCFPCQDCSSKANLSGGVWKDNINMALVVDTYYDDQLISCGSVNRGTCQRHVFPHNHTADIQSEVHCIFSPQIEEPSQCPDCVVSALGAKVLSSVKDRFINFFVGNTINSSYFPDHPLHSISVRRLKETKDGFMFLTDQSYIDVLPEFRDSYPIKYVHAFESNNFIYFLTVQRETLDAQTFHTRIIRFCSINSGLHSYMEMPLECILTEKRKKRSTKKEVFNILQAAYVSKPGAQLARQIGASLNDDILFGVFAQSKPDSAEPMDRSAMCAFPIKYVNDFFNKIVNKNNVRCLQHFYGPNHEHCFNRTLLRNSSGCEARRDEYRTEFTTALQRVDLFMGQFSEVLLTSISTFIKGDLTIANLGTSEGRFMQVVVSRSGPSTPHVNFLLDSHPVSPEVIVEHTLNQNGYTLVITGKKITKIPLNGLGCRHFQSCSQCLSAPPFVQCGWCHDKCVRSEECLSGTWTQQICLPAIYKVFPNSAPLEGGTRLTICGWDFGFRRNNKFDLKKTRVLLGNESCTLTLSESTMNTLKCTVGPAMNKHFNMSIIISNGHGTTQYSTFSYVDPVITSISPKYGPMAGGTLLTLTGNYLNSGNSRHISIGGKTCTLKSVSNSILECYTPAQTISTEFAVKLKIDLANRETSIFSYREDPIVYEIHPTKSFISTWWKEPLNIVSFLFCFASGGSTITGVGKNLNSVSVPRMVINVHEAGRNFTVACQHRSNSEIICCTTPSLQQLNLQLPLKTKAFFMLDGILSKYFDLIYVHNPVFKPFEKPVMISMGNENVLEIKGNDIDPEAVKGEVLKVGNKSCENIHLHSEAVLCTVPNDLLKLNSELNIEWKQAISSTVLGKVIVQPDQNFTGLIAGVVSISTALLLLLGFFLWLKKRKQIKDLGSELVRYDARVHTPHLDRLVSARSVSPTTEMVSNESVDYRATFPEDQFPNSSQNGSCRQVQYPLTDMSPILTSGDSDISSPLLQNTVHIDLSALNPELVQAVQHVVIGPSSLIVHFNEVIGRGHFGCVYHGTLLDNDGKKIHCAVKSLNRITDIGEVSQFLTEGIIMKDFSHPNVLSLLGICLRSEGSPLVVLPYMKHGDLRNFIRNETHNPTVKDLIGFGLQVAKAMKYLASKKFVHRDLAARNCMLDEKFTVKVADFGLARDMYDKEYYSVHNKTGAKLPVKWMALESLQTQKFTTKSDVWSFGVVLWELMTRGAPPYPDVNTFDITVYLLQGRRLLQPEYCPDPLYEVMLKCWHPKAEMRPSFSELVSRISAIFSTFIGEHYVHVNATYVNVKCVAPYPSLLSSEDNADDEVDTRPASFWETS

SEQ ID NO: 37 - protein, 641 aa, Homo sapiens
VGCNPNEDVAIFAVDSLRQLSMKFLEKGELANFRFQKDFLRPFEHIMKKNRSPTIRDMAIRCIAQMVNSQAANIRSGWKNIFAVFHQAASDHDGNIVELAFQTTCHIVTTIFQHHFPAAIDSFQDAVKCLSEFACNAAFPDTSMEAIRLIRFCGKYVSERPRVLQEYTSDDMNVAPGDRVWVRGWFPILFELSCIINRCKLDVRTRGLTVMFEIMKSYGHTFEKHWWQDLFRIVFRIFDNMKLPEQLSEKSEWMTTTCNHALYAICDVFTQFYEALNEVLLSDVFAQLQWCVKQDNEQLARSGTNCLENLVISNGEKFSPEVWDETCNCMLDIFKTTIPHVLLTWRPVGMEEDSSEKHLDVDLDRQSLSSIDKNPSERGQSQLSNPTDDSWKGRPYANQKLFASLLIKCVVQLELIQTIDNIVFYPATSKKEDAEHMVAAQQDTLDADIHIETEDQGMYKYMSSQHLFKLLDCLQESHSFSKAFNSNYEQRTVLWRAGFKGKSKPNLLKQETSSLACCLRILFRMYVDENRRDSWEEIQQRLLTVCSEALAYFITVNSESHREAWTSLLLLLLTKTLKINDEKFKAHASMYYPYLCEIMQFDLIPELRAVLRKFFLRIGVVYKIWIPEEPSQVPAALSPVW

SEQ ID NO: 38 - protein, 534 aa, Homo sapiens
MIARQQCVRGGPRGFSCGSAIVGGGKRGAFSSVSMSGGAGRCSSGGFGSRSLYNLRGNKSISMSVAGSRQGACFGGAGGFGTGGFGAGGFGAGFGTGGFGGGFGGSFSGKGGPGFPVCPAGGIQEVTINQSLLTPLHVEIDPEIQKVRTEEREQIKLLNNKFASFIDKVQFLEQQNKVLETKWNLLQQQTTTTSSKNLEPLFETYLSVLRKQLDTLGNDKGRLQSELKTMQDSVEDFKTKYEEEINKRTAAENDFVVLKKDVDAAYLNKVELEAKVDSLNDEINFLKVLYDAELSQMQTHVSDTSVVLSMDNNRNLDLDSIIAEVRAQYEEIAQRSKAEAEALYQTKVQQLQISVDQHGDNLKNTKSEIAELNRMIQRLRAEIENIKKQCQTLQVSVADAEQRGENALKDAHSKRVELEAALQQAKEELARMLREYQELMSVKLALDIEIATYRKLLEGEEYRMSGECQSAVSISVVSGSTSTGGISGGLGSGSGFGLSSGFGSGSGSGFGFGGSVSGSSSSKIISTTTLNKRR

SEQ ID NO: 39 - protein, 107 aa, Homo sapiens
MASGAARWLVLAPVRSGALRSGPSLRKDGDVSAAWSGSGRSLVPSGSVIVTRSGAILPKPVKMSFGLLRVFSIVIPFLYVGTLISKNFAALLEEHDIFVPEDDDDDD

SEQ ID NO: 40 - protein, 113 aa, Homo sapiens
MSAIQNLHSFDPFADASKGDDLLPAGTEDYIHIRIQQRNGRKTLTTVQGIADDYDKKKLVKAFKKKFACNGTVIEHPEYGEVIQLQGDQRKNICQFLVEIGLAKDDQLKVHGF

SEQ ID NO: 41 - protein, 654 aa, Homo sapiens
MKLSLVAAMLLLLSAARAEEEDKKEDVGTVVGIDLGTTYSCVGVFKNGRVEIIANDQGNRITPSYVAFTPEGERLIGDAAKNQLTSNPENTVFDAKRLIGRTWNDPSVQQDIKFLPFKVVEKKTKPYIQVDIGGGQTKTFAPEEISAMVLTKMKETAEAYLGKKVTHAVVTVPAYFNDAQRQATKDAGTIAGLNVMRIINEPTAAAIAYGLDKREGEKNILVFDLGGGTFDVSLLTIDNGVFEVVATNGDTHLGGEDFDQRVMEHFIKLYKKKTGKDVRKDNRAVQKLRREVEKAKRALSSQHQARIEIESFYEGEDFSETLTRAKFEELNMDLFRSTMKPVQKVLEDSDLKKSDIDEIVLVGGSTRIPKIQQLVKEFFNGKEPSRGINPDEAVAYGAAVQAGVLSGDQDTGDLVLLDVCPLTLGIETVGGVMTKLIPRNTVVPTKKSQIFSTASDNQPTVTIKVYEGERPLTKDNHLLGTFDLTGIPPAPRGVPQIEVTFEIDVNGILRVTAEDKGTGNKNKITITNDQNRLTPEEIERMVNDAEKFAEEDKKLKERIDTRNELESYAYSLKNQIGDKEKLGGKLSSEDKETMEKAVEEKIEWLESHQDADIEDFKAKKKELEEIVQPIISKLYGSAGPPPTGEEDTAEKDEL

SEQ ID NO: 42 - protein, 255 aa, Homo sapiens
VVSPDSIHSVAPENEGRLVHIIGALRTSKLLSDPNYGVHLPAVKLRRHVEMYQWVETEESREYTEDGQVKKETRYSYNTEWRSEIINSKNFDREIGHNNPSAMAVESFTATAPFVQIGRFFLSSGLIDKVDNFKSLSLSKLEDPHVDIIRRGDFFYHSENPKYPEVGDLRVSFSYAGLSGDDPDLGPAHVVTVIARQRGDQLVPFSTKSGDTLLLLHHGDFSAEVSAVPYSYGGGTSMSFLPSSGYLIRSHYQGS

SEQ ID NO: 43 - protein, 2127 aa, Homo sapiens
MRAAGAEGRKFAVERPGFRGQGRGRQRWLLRHTEGGAMGDEMDAMIPEREMKDFQFRALKKVRIFDSPEELPKERSSLLAVSNKYGLVFAGGASGLQIFPTKNLLIQNKPGDDPNKIVDKVQGLLVPMKFPIHHLALSCDNLTLSACMMSSEYGSIIAFFDVRTFSNEAKQQKRPFAYHKLLKDAGGMVIDMKWNPTVPSMVAVCLADGSIAVLQVTETVKVCATLPSTVAVTSVCWSPKGKQLAVGKQNGTVVQYLPTLQEKKVIPCPPFYESDHPVRVLDVLWIGTYVFAIVYAAADGTLETSPDVVMALLPKKEEKHPEIFVNFMEPCYGSCTERQHHYYLSYIEEWDLVLAASAASTEVSILARQSDQINWESWLLEDSSRAELPVTDKSDDSLPMGVVVDYTNQVEITISDEKTLPPAPVLMLLSTDGVLCPFYMINQNPGVKSLIKTPERLSLEGERQPKSPGSTPTTPTSSQAPQKLDASAAAAPASLPPSSPAAPIATFSLLPAGGAPTVFSFGSSSLKSSATVTGEPPSYSSGSDSSKAAPGPGPSTFSFVPPSKASLAPTPAASPVAPSAASFSFGSSGFKPTLESTPVPSVSAPNIAMKPSFPPSTSAVKVNLSEKFTAAATSTPVSSSQSAPPMSPFSSASKPAASGPLSHPTPLSAPPSSVPLKSSVLPSPSGRSAQGSSSPVPSMVQKSPRITPPAAKPGSPQAKSLQPAVAEKQGHQWKDSDPVMAGIGEEIAHFQKELEELKARTSKACFQVGTSEEMKMLRTESDDLHTFLLEIKETTESLHGDISSLKTTLLEGFAGVEEAREQNERNRDSGYLHLLYKRPLDPKSEAQLQEIRRLHQYVKFAVQDVNDVLDLEWDQHLEQKKKQRHLLVPERETLFNTLANNREIINQQRKRLNHLVDSLQQLRLYKQTSLWSLSSAVPSQSSIHSFDSDLESLCNALLKTTIESHTKSLPKVPAKLSPMKQAQLRNFLAKRKTPPVRSTAPASLSRSAFLSQRYYEDLDEVSSTSSVSQSLESEDARTSCKDDEAVVQAPRHAPVVRTPSIQPSLLPHAAPFAKSHLVHGSSPGVMGTSVATSASKIIPQGADSTMLATKTVKHGAPSPSHPISAPQAAAAAALRRQMASQAPAVNTLTESTLKNVPQVVNVQELKNNPATPSTAMGSSVPYSTAKTPHPVLTPVAANQAKQGSLINSLKPSGPTPASGQLSSGDKASGTAKIETAVTSTPSASGQFSKPFSFSPSGTGFNFGIITPTPSSNFTAAQGATPSTKESSQPDAFSSGGGSKPSYEAIPESSPPSGITSASNTTPGEPAASSSRPVAPSGTALSTTSSKLETPPSKLGELLFPSSLAGETLGSFSGLRVGQADDSTKPTNKASSTSLTSTQPTKTSGVPSGFNFTAPPVLGKHTEPPVTSSATTTSVAPPAATSTSSTAVFGSLPVTSAGSSGVISFGGTSLSAGKTSFSFGSQQTNSTVPPSAPPPTTAATPLPTSFPTLSFGSLLSSATTPSLPMSAGRSTEEATSSALPEKPGDSEVSASAASLLEEQQSAQLPQAPPQTSDSVKKEPVLAQPAVSNSGTAASSTSLVALSAEATPATTGVPDARTEAVPPASSFSVPGQTAVTAAAISSAGPVAVETSSTPIASSTTSIVAPGPSAEAAAFGTVTSGSSVFAQPPAASSSSAFNQLTNNTATAPSATPVFGQVAASTAPSLFGQQTGSTASTAAATPQVSSSGFSSPAFGTTAPGVFGQTTFGQASVFGQSASSAASVFSFSQPGFSSVPAFGQPASSTPTSTSGSVFGAASSTSSSSSFSFGQSSPNTGGGLFGQSNAPAFGQSPGFGQGGSVFGGTSAATTTAATSGFSFCQASGFGSSNTGSVFGQAASTGGIVFGQQSSSSSGSVFGSGNTGRGGGFFSGLGGKPSQDAANKNPFSSASGGFGSTATSNTSNLFGNSGAKTFGGFASSSFGEQKPTGTFSSGGGSVASQGFGFSSPNKTGGFGAAPVFGSPPTFGGSPGFGGVPAFGSAPAFTSPLGSTGGKVFGEGTAAASAGGFGFGSSSNTTSFGTLASQNAPTFGSLSQQTSGFGTQSSGFSGFGSGTGGFSFGSNNSSVQGFGGWRS

SEQ ID NO: 44 - protein, 81 aa, Homo sapiens
MSSDERKAFLQFTTGCSTLPPGGLANLHPRLTVVRKVDATDASYPSVNTCVHYLKLPEYSSEEIMRERLLAATMEKGFHLN

SEQ ID NO: 45 - protein, 1071 aa, Homo sapiens
MPAIMTMLADHAARQLLDFSQKLDINLLDNVVNCLYHGEGAQQRMAQEVLTHLKEHPDAWTRVDTILEFSQNMNTKYYGLQILENVIKTRWKILPRNQCEGIKKYVVGLIIKTSSDPTCVEKEKVYIGKLNMILVQILKQEWPKHWPTFISDIVGASRTSESLCQNNMVILKLLSEEVFDFSSGQITQVKSKHLKDSMCNEFSQIFQLCQFVMENSQNAPLVHATLETLLRFLNWIPLGYIFETKLISTLIYKFLNVPMFRNVSLKCLTEIAGVSVSQYEEQFVTLFTLTMMQLKQMLPLNTNIRLAYSNGKDDEQNFIQNLSLFLCTFLKEHDQLIEKRLNLRETLMEALHYMLLVSEVEETEIFKICLEYWNHLAAELYRESPFSTSASPLLSGSQHFDVPPRRQLYLPMLFKVRLLMVSRMAKPEEVLVVENDQGEVVREFMKDTDSINLYKNMRETLVYLTHLDYVDTERIMTEKLHNQVNGTEWSWKNLNTLCWAIGSISGAMHEEDEKRFLVTVIKDLLGLCEQKRGKDNKAIIASNIMYIVGQYPRFLRAHWKFLKTVVNKLFEFMHETHDGVQDMACDTFIKIAQKCRRHFVQVQVGEVMPFIDEILNNINTIICDLQPQQVHTFYEAVGYMIGAQTDQTVQEHLIEKYMLLPNQVWDSIIQQATKNVDILKDPETVKQLGSILKTNVRACKAVGHPFVIQLGRIYLDMLNVYKCLSENISAAIQANGEMVTKQPLIRSMRTVKRETLKLISGWVSRSNDPQMVAENFVPPLLDAVLIDYQRNVPAAREPEVLSTMAIIVNKLGGHITAEIPQIFDAVFECTLNMINKDFEEYPEHRTNFFLLLQAVNSHCFPAFLAIPPTQFKLVLDSIIWAFKHTMRNVADTGLQILFTLLQNVAQEEAAAQSFYQTYFCDILQHIFSVVTDTSHTAGLTMHASILAYMFNLVEEGKISTSLNPGNPVNNQIFLQEYVANLLKSAFPHLQDAQVKLFVTGLFSLNQDIPAFKEHLRDFLVQIKEFAGEDTSDLFLEEREIALRQADEEKHKRQMSVPGIFNPHEIPEEMCD

SEQ ID NO: 46 - protein, 178 aa, Homo sapiens
MADGKAGDEKPEKSQRAGAAGGPEEEAEKPVKTKTVSSSNGGESSSRSAEKRSAEEEAADLPTKPTKISKFGFAIGSQTTKKASAISIKLGSSKPKETVPTLAPKTLSVAAAFNEDEDSEPEEMPPEAKMRMKNIGRDTPTSAGPNSFNKGKHGFSDNQKLWERNIKSHLGNVHDQDN

SEQ ID NO: 47 - protein, 351 aa, Homo sapiens
MPGSAAKGSELSERIESFVETLKRGGGPRSSEEMARETLGLLRQIITDHRWSNAGELMELIRREGRRMTAAQPSETTVGNMVRRVLKIIREEYGRLHGRSDESDQQESLHKLLTSGGLNEDFSFHYAQLQSNIIEAINELLVELEGTMENIAAQALEHIHSNEVIMTIGFSRTVEAFLKEAARKRKFHVIVAECAPFCQGHEMAVNLSKAGIETTVMTDAAIFAVMSRVNKVIIGTKTILANGALRAVTGTHTLALAAKHHSTPLIVCAPMFKLSPQFPNEEDSFHKFVAPEEVLPFTEGDILEKVSVHCPVFDYVPPELITLFISNIGGNAPSYIYRLMSELYHPDDHVL

SEQ ID NO: 48 - protein, 492 aa, Homo sapiens
MVKFPALTHYWPLIRFLVPLGITNIAIDFGEQALNRGIAAVKEDAVEMLASYGLAYSLMKFFTGPMSDFKNVGLVFVNSKRDRTKAVLCMVVAGAIAAVFHTLIAYSDLGYYIINKLHHVDESVGSKTRRAFLYLAAFPFMDAMAWTHAGILLKHKYSFLVGCASISDVIAQVVFVAILLHSHLECREPLLIPILSLYMGALVRCTTLCLGYYKNIHDIIPDRSGPELGGDATIRKMLSFWWPLALILATQRISRPIVNLFVSRDLGGSSAATEAVAILTATYPVGHMPYGWLTEIRAVYPAFDKNNPSNKLVSTSNTVTAAHIKKFTFVCMALSLTLCFVMFWTPNVSEKILIDIIGVDFAFAELCVVPLRIFSFFPVPVTVRAHLTGWLMTLKKTFVLAPSSVLRIIVLIASLVVLPYLGVHGATLGVGSLLAGFVGESTMVAIAACYVYRKQKKKMENESATEGEDSAMTDMPPTEEVTDIVEMREENE

SEQ ID NO: 49 - protein, 1590 aa, Homo sapiens
VILHPSISVRLAAAWCLHCIAVALPSYLTPLLDRCLERLTGHKSSPEAVTGFSFAVAALLGAVKHCPLGIPHGKGKIIMTLAEDLLCSAAQNSRLSAQRTQAGWLLISALMTLGPAVVSHHLARVLLLWKCVFPASPKDLETEKSRGDSFTWQVTLEGRAGALCAIKSFVSHCGDLLTEEVTQRLLPPLPCAVDLLTQLSSILKMYGSPLKTPSVVYRQRLYELLILLPPETYEGNLCAILRELAADLTAPDIQVAASTFLLPPLCHQDDLLILSPFLQETDHRFIEEQLLLGNGVACGSLEYDPYSIYEKDVEGDSVPKPLPPALSVISSASKLFGVVCAHVGETQRLLILEQLLDSIKHTKGARQQVVQLHVVSSVSSFLKYVAGSKGCLGPEEMKRFALTLVMGALESPNPLLRCAAAESWARLAQMVDDGAFTAGLAQVSFDKLKSARDVVTRTGHSLALGSLHRYLGGISSSQHLNSCIGILYTLAQDSTSPDVQTWALHSLSLIIDSAGPLYYVHVEPTLSLIIMLLLNVPPTHAEVHQSLGRCLNALITTLGPELQGNSTSISTLRTSCLLGCAVMQDNPDCLVQAQAISCLQQLHMFAPRHVNLSSLVSCLCVNLCSPYLLLRRAVLACLRQLVQREAAEVSEHAVMLAKDSREELTPDANIREVGLEGALLILLDKETDERLCHDIKETLNYMLTSMAVEKLSLWLKLCKDVLAASADFTAVTCVDTMQEEEGDKGDDASVLTTRRDEKSHPFTNPRWATRVFAAECVCRIINQCENANSAHFDIALAQEMKKRDSRNDFLVLHLADLIRMAFMAATDHSDQLRLSGLEMLLVVIRRFATVPEPEFPGHVILEQYQANVGAALRPAFTSETPPDVTAKACQVCSAWIASGVVSDLNDLRRVHQLLVSSLTKIQAGKEALSHLYNESASTMEILAVLKAWAEVYIIAVQRHKNHRQPLKTTTCLEDGIRNGSCSSDGLLDLVYADLGTLSRLWLAALQDFALLTLPSEFASQLPAEGGAFYTAETSENAKLHYYNSWALILHATALWLTSTGFVVADPDEGASNLSRPVTPTSMCQGSSSGATIKSPEDVYTDRFHLILGISVEFLCSLRSDATMESITACLHALQALLDVPWPRSKIGSDQDLGIELLNVLHRVILTRESPSIQLASLEVVRQIICAAQEHVKEKRRSAEVDDGAAEKETLPEFGEGKDTGGLVPGKSLVFATLELCVCILVRQLPELNPKLTGSPGVKATKPQILLEDGSRLVSAALVILSELPAVCSPEGSISILPTILYLTIGVLRETAVKLPGGQLSSTVAASLQALKGILSSPMARAEKSRTAWTDLLRSALTTILDCWDPVDETHQELDEVSLLTAITVFILSTSPEVTTIPCLQKRCIDKFKATLEIKDPVVQIKTYQLLHSIFQYPNPAVSYPYIYSLASCIMEKLQEIDKRKPENTAELEIFQEGIKVLETLVTVAEEHHRAQLVACLLPILISFLLDENSLGSATSIMRNLHDFALQNLMQIGPQYSSVFKSLVASSPALKARLEAAIKGNQESVKVKIPTSKYTKSPGKNSSIQLKTSFL

SEQ ID NO: 50 - protein, 1514 aa, Homo sapiens
FSTRYPLSIANYDHKAMVPFGFPEFFRCDPAISPSLHAAAQISRGEFVRISGLDYVDSALLMGRDRDKPFKRRLKSESVETSLFRKLRTVKSEHETFKFTSELEESRLERGIRPWNCQRCFAHYDVQSILFNINEAMATRANVGKRKNITTGASAASQTQMPTGQTGNCESPLGSKEDLNSKENLDADEGDGKSNDLVLSCPYFRNETGGEGDRRIALSRANSSSFSSGESCSFESSLSSHCTNAGVSVLEVPRENQPIHREKVKRYIIEHIDLGAYYYRKFFYGKEHQNYFGIDENLGPVAVSIRREKVEDAKEKEGSQFNYRVAFRTSELTTLRGAILEDAIPSTARHGTARGLPLKEVLEYVIPELSIQCLRQASNSPKVSEQLLKLDEQGLSFQHKIGILYCKAGQSTEEEMYNNETAGPAFEEFLDLLGQRVRLKGFSKYRAQLDNKTDSTGTHSLYTTYKDYELMFHVSTLLPYMPNNRQQLLRKRHIGNDIVTIVFQEPGALPFTPKSIRSHFQHVFVIVKVHNPCTENVCYSVGVSRSKDVPPFGPPIPKGVTFPKSAVFRDFLLAKVINAENAAHKSEKFRAMATRTRQEYLKDLAENFVTTATVDTSVKFSFITLGAKKKEKVKPRKDAHLFSIGAIMWHVIARDFGQSADIECLLGISNEFIMLIEKDSKNVVFNCSCRDVIGWTSGLVSIKVFYERGECVLLSSVDNCAEDIREIVQRLVIVTRGCETVEMTLRRNGLGQLGFHVNFEGIVADVEPFGFAWKAGLRQGSRLVEICKVAVATLTHEQMIDLLRTSVTVKVVIIQPHDDGSPRRGCSELCRIPMVEYKLDSEGTPCEYKTPFRRNTTWHRVPTPALQPLSRASPIPGTPDRLPCQQLLQQAQAAIPRSTSFDRKLPDGTRSSPSNQSSSSDPGPGGSGPWRPQVGYDGCQSPLLLEHQGSGPLECDGAREREDTMEASRHPETKWHGPPSKVLGSYKERALQKDGSCKDSPNKLSHIGDKSCSSHSSSNTLSSNTSSNSDDKHFGSGDLMDPELLGLTYIKGASTDSGIDTAPCMPATILGPVHLAGSRSLIHSRAEQWADAADVSGPDDEPAKLYSVHGYASAISAGSAAEGSMGDLSEISSHSSGSHHSGSPSAHCSKSSGSLDSSKVYIVSHSSGQQVPGSMSKPYHRQGAVNKYVIGWKKSEGSPPPEEPEVTECPGMYSEMDVMSTATQHQTVVGDAVAETQHVLSKEDFLKLMLPDSPLVEEGRRKFSFYGNLSPRRSLYRTLSDESICSNRRGSSFGSSRSSVLDQALPNDILFSTTPPYHSTLPPRAHPAPSMGSLRNEFWFSDGSLSDKSKCADPGLMPLPDTATGLDWTHLVDAARAFEGLDSDEELGLLCHHTSYLDQRVASFCTLTDMQHGQDLEGAQELPLCVDPGSGKEFMDTTGERSPSPLTGKVNQLELILRQLQTDLRKEKQDKAVLQAEVQHLRQDNMRLQEESQTATAQLRKFTEWFFTTIDKKS

SEQ ID NO: 51 - protein, 905 aa, Homo sapiens
MAKRALRDFIDKYLYAMRLSDETLIDIMTRFRKEMKNGLSRDFNPTATVKMLPTFVRSIPDGSEKGDFIALDLGGSSFRILRVQVNHEKNQNVHMESEVYDTPENIVHGSGSQLFDHVAECLGDFMEKRKIKDKKLPVGFTFSFPCQQSKIDEAILITWTKRFKASGVEGADVVKLLNKAIKKRGDYDANIVAVVNDTVGTMMTCGYDDQHCEVGLIIGTGTNACYMEELRHIDLVEGDEGRMCINTEWGAFGDDGSLEDIRTEFDREIDRGSLNPGKQLFEKMVSGMYLGELVRLILVKMAKEGLLFEGRITPELLTRGKFNTSDVSAIEKNKEGLHNAKEILTRLGVEPSDDDCVSVQHVCTIVSFRSANLVAATLGAILNRLRDNKGTPRLRTTVGVDGSLYKTHPQYSRRFHKTLRRLVPDSDVRFLLSESGSGKGAAMVTAVAYRLAEQHRQIEETLAHFHLTKDMLLEVKKRMRAEMELGLRKQTHNNAVVKMLPSFVRRTPDGTENGDFLALDLGGTNFRVLLVKIRSGKKRTVEMHNKIYAIPIEIMQGTGEELFDHIVSCISDFLDYMGIKGPRMPLGFTFSFPCQQTSLDAGILITWTKGFKATDCVGHDVVTLLRDAIKRREEFDLDVVAVVNDTVGTMMTCAYEEPTCEVGLIVGTGSNACYMEEMKNVEMVEGDQGQMCINMEWGAFGDNGCLDDIRTHYDRLVDEYSLNAGKQRYEKMISGMYLGEIVRNILIDFTKKGFLFRGQISETLKTRGIFETKFLSQIESDRLALLQVRAILQQLGLNSTCDDSILVKTVCGVVSRRAAQLCGAGMAAVVDKIRENRGLDRLNVTVGVDGTLYKLHPHFSRIMHQTVKELSPKCNVSFLLSEDGSGKGAALITAVGVRLRTEASS

SEQ ID NO: 52 - protein, 377 aa, Homo sapiens
MCDDEETTALVCDNGSGLVKAGFAGDDAPRAVFPSIVGRPRHQGVMVGMGQKDSYVGDEAQSKRGILTLKYPIEHGIITNWDDMEKIWHHTFYNELRVAPEEHPTLLTEAPLNPKANREKMTQIMFETFNVPAMYVAIQAVLSLYASGRTTGIVLDSGDGVTHNVPIYEGYALPHAIMRLDLAGRDLTDYLMKILTERGYSFVTTAEREIVRDIKEKLCYVALDFENEMATAASSSSLEKSYELPDGQVITIGNERFRCPETLFQPSFIGMESAGIHETTYNSIMKCDIDIRKDLYANNVLSGGTTMYPGIADRMQKEITALAPSTMKIKIIAPPERKYSVWIGGSILASLSTFQQMWISKQEYDEAGPSIVHRKCF

SEQ ID NO: 53 - protein, 958 aa, Homo sapiens
MKEAKDARYTNGHLFTTISVSGMTMCYACNKSITAKEALICPTCNVTIHNRCKDTLANCTKVKQKQQKAALLKNNTALQSVSLRSKTTIRERPSSAIYPSDSFRQSLLGSRRGRSSLSLAKSVSTTNIAGHFNDESPLGLRRILSQSTDSLNMRNRTLSVESLIDEEVIYSELMSDFEMDEKDFAADSWSLAVDSSFLQQHKKEVMKQQDVIYELIQTELHHVRTLKIMTRLFRTGMLEELHLEPGVVQGLFPCVDELSDIHTRFLSQLLERRRQALCPGSTRNFVIHRLGDLLISQFSGPSAEQMCKTYSEFCSRHSKALKLYKELYARDKRFQQFIRKVTRPAVLKRHGVQECILLVTQRITKYPLLISRILQHSHGIEEERQDLTTALGLVKELLSNVDEGIYQLEKGARLQEIYNRMDPRAQTPVPGKGPFGREELLRRKLIHDGCLLWKTATGRFKDVLVLLMTDVLVFLQEKDQKYIFPTLDKPSVVSLQNLIVRDIANQEKGMFLISAAPPEMYEVHTASRDDRSTWIRVIQQSVRTCPSREDFPLIETEDEAYLRRIKMELQQKDRALVELLREKVGLFAEMTHFQAEEDGGSGMALPTLPRGLFRSESLESPRGERLLQDAIREVEGLKDLLVGPGVELLLTPREPALPLEPDSGGNTSPGVTANGEARTFNGSIELCRADSDSSQRDRNGNQLRSPQEEALQRLVNLYGLLHGLQAAVAQQDTLMEARFPEGPERREKLCRANSRDGEAGRAGAAPVAPEKQATELALLQRQHALLQEELRRCRRLGEERATEAGSLEARLRESEQARALLEREAEEARRQLAALGQTEPLPAEAPWARRPVDPRRRSLPAGDALYLSFNPPQPSRGTDRLDLPVTTRSVHRNFEDRERQELGSPEERLQDSSDPDTGSEEEGSSRLSPPHSPRDFTRMQDIPEETESRDGEAVASES

SEQ ID NO: 54 - protein, 316 aa, Homo sapiens
MSGDTCLCPASGAKPKLSGFKGGGLGNKYVQLNVGGSLYYTTVRALTRHDTMLKAMFSGRMEVLTDKEGWILIDRCGKHFGTILNYLRDDTITLPQNRQEIKELMAEAKYYLIQGLVNMCQSALQDKKDSYQPVCNIPIITSLKEEERLIESSTKPVVKLLYNRSNNKYSYTSNSDDHLLKNIELFDKLSLRFNGRVLFIKDVIGDEICCWSFYGQGRKLAEVCCTSIVYATEKKQTKVEFPEARIYEETLNVLLYETPRVPDNSLLEATSRSRSQASPSEDEETFELRDRVRRIHVKRYSTYDDRQLGHQSTHRD

SEQ ID NO: 55 - protein, 515 aa, Homo sapiens
MALFVRLLALALALALGPAATLAGPAKSPYQLVLQHSRLRGRQHGPNVCAVQKVIGTNRKYFTNCKQWYQRKICGKSTVISYECCPGYEKVPGEKGCPAALPLSNLYETLGVVGSTTTQLYTDRTEKLRPEMEGPGSFTIFAPSNEAWASLPAEVLDSLVSNVNIELLNALRYHMVGRRVLTDELKHGMTLTSMYQNSNIQIHHYPNGIVTVNCARLLKADHHATNGVVHLIDKVISTITNNIQQIIEIEDTFETLRAAVAASGLNTMLEGNGQYTLLAPTNEAFEKIPSETLNRILGDPEALRDLLNNHILKSAMCAEAIVAGLSVETLEGTTLEVGCSGDMLTINGKAIISNKDILATNGVIHYIDELLIPDSAKTLFELAAESDVSTAIDLFRQAGLGNHLSGSERLTLLAPLNSVFKDGTPPIDAHTRNLLRNHIIKDQLASKYLYHGQTLETLGGKKLRVFVYRNSLCIENSCIAAHDKRGRYGTLFTMDRVLTPPMGTVMDVLKGDNRF

SEQ ID NO: 56 - protein, 381 aa, Homo sapiens
MPFGNTHNKFKLNYKPEEEYPDLSKHNNHMAKVLTLELYKKLRDKETPSGFTVDDVIQTGVDNPGHPFIMTVGCVAGDEESYEVFKELFDPIISDRHGGYKPTDKHKTDLNHENLKGGDDLDPNYVLSSRVRTGRSIKGYTLPPHCSRGERRAVEKLSVEALNSLTGEFKGKYYPLKSMTEKEQQQLIDDHFLFDKPVSPLLLASGMARDWPDARGIWHNDNKSFLVWVNEEDHLRVISMEKGGNMKEVFRRFCVGLQKIEEIFKKAGHPFMWNQHLGYVLTCPSNLGTGLRGGVHVKLAHLSKHPKFEEILTRLRLQKRGTGGVDTAAVGSVFDVSNADRLGSSEVEQVQLVVDGVKLMVEMEKKLEKGQSIDDMIPAQK

SEQ ID NO: 57 - protein, 116 aa, Homo sapiens [sequence omitted]

SEQ ID NO: 58 - protein, 760 aa, Homo sapiens
MVLKAFFPTCCVSTDSGLLVGRWVPEQSSAVVLAVLHFPFIPIQVKQLLAQVRQASQVGVAVLGTWCHCRQEPEESLGRFLESLGAVFPHEPWLRLCRERGGTFWSCEATHRQAPTAPGAPGEDQVMLIFYDQRQVLLSQLHLPTVLPDRQAGATTASTGGLAAVFDTVARSEVLFRSDRFDEGPVRLSHWQSEGVEASILAELARRASGPICLLLASLLSLVSAVSACRVFKLWPLSFLGSKLSTCEQLRHRLEHLTLIFSTRKAENPAQLMRKANTVASVLLDVALGLMLLSWLHGRSRIGHLADALVPVADHVAEELQHLLQWLMGAPAGLKMNRALDQVLGRFFLYHIHLWISYIHLMSPFVEHILWHVGLSACLGLTVALSLLSDIIALLTFHIYCFYVYGARLYCLKIHGLSSLWRLFRGKKWNVLRQRVDSCSYDLDQLFIGTLLFTILLFLLPTTALYYLVFTLLRLLVVAVQGLIHLLVDLINSLPLYSLGLRLCRPYRLADKPTALQPRGAHLPPPQLWLPPQALLGRPVPQAVPWGAHLPLEAERGQAGLRELLARLAPPHGHSQPSALPGWHQLSWRMSCALWTLLCAPEHGRPCYHTLGLEVIGSEQMWGWPARLAALHHWHCLPWDPLPTCCGHHGGEHSNPRCPEHCPMPTLCTQVQRVRPPQQPQVEGWSPWGLPSGSALAVGVEGPCQDEPPSPRHPLAPSAEQHPASGGLKQSLTPVPSGPGPSLPEPHGVYLRMFPGEVAL

SEQ ID NO: 59 - protein, 398 aa, Homo sapiens [sequence omitted]

SEQ ID NO: 60 - protein, 478 aa, Homo sapiens
MSQVTFSDVAIDFSHEEWACLDSAQRDLYKDVMVQNYENLVSVGLSVTKPYVIMLLEDGKEPWMMEKKLSKAYPFPLSHSVPASVNFGFSALFEHCSEVTEIFELSELCVFWVLHFLSNSPNSTVEAFSRSKKKKKKKKKRQCFAFLIYFRLGIKMGKQGIINKEGYLYEDSPQPVTMEKVVKQSYEFSNSNKNLEYTECDTFRSTFHSKSTLSEPQNNSAEGNSHKYDILKKNLSKKSVIKSERINGGKKLLNSNKSGAAFNQSKSLTLPQTCNREKIYTCSECGKAFGKQSILSRHWRIHTGEKPYECRECGKTFSHGSSLTRHQISHSGEKPYKCIECGKAFSHGSSLTNHQSTHTGEKPYECMNCGKSFSRVSLLIQHLRIHTQEKRYECRICGKAFIHSSSLIHHQKSHTGEKPYECRECGKAFCCSSHLTQHQRIHSMKKKYECNKCLKVFSSFSFLVQHQSIHTEEKPFEV

SEQ ID NO: 61 - protein, 435 aa, Homo sapiens
MIGGLFIYNHKGEVLISRVYRDDIGRNAVDAFRVNVIHARQQVRSPVTNIARTSFFHVKRSNIWLAAVTKQNVNAAMVFEFLYKMCDVMAAYFGKISEENIKNNFVLIYELLDEILDFGYPQNSETGALKTFITQQGIKSQHQTKEEQSQITSQVTGQIGWRREGIKYRRNELFLDVLESVNLLMSPQGQVLSAHVSGRVVMKSYLSGMPECKFGMNDKIVIEKQGKGTADETSKSGKQSIAIDDCTFHQCVRLSKFDSERSISFIPPDGEFELMRYRTTKDIILPFRVIPLVREVGRTKLEVKVVIKSNFKPSLLAQKIEVRIPTPLNTSGVQVICMKGKAKYKASENAIVWKIKRMAGMKESQISAEIELLPTNDKKKWARPPISMNFEVPFAPSGLKVRYLKVFEPKLNYSDHDVIKWVRYIGRSGIYETRC

SEQ ID NO: 62 - protein, 423 aa, Homo sapiens
MATATRLLGWRVASWRLRPPLAGFVSQRAHSLLPVDDAINGLSEEQRQLRQTMAKFLQEHLAPKAQEIDRSNEFKNLREFWKQLGNLGVLGITAPVQYGGSGLGYLEHVLVMEEISRASGAVGLSYGAHSNLCINQLVRNGNEAQKEKYLPKLISGEYIGALAMSEPNAGSDVVSMKLKAEKKGNHYILNGNKFWITNGPDADVLIVYAKTDLAAVPASRGITAFIVEKGMPGFSTSKKLDKLGMRGSNTCELIFEDCKIPAANILGHENKGVYVLMSGLDLERLVLAGGPLGLMQAVLDHTIPYLHVREAFGQKIGHFQLMQGKMADMYTRLMACRQYVYNVAKACDEGHCTAKDCAGVILYSAECATQVALDGIQCFGGNGYINDFPMGRFLRDAKLYEIGAGTSEVRRLVIGRAFNADFH

SEQ ID NO: 63 - protein, 337 aa, Homo sapiens
METKEKPKPTPDYLMQLMNDKKLMSSLPNFCGIFNHLERLLDEEISRVRKDMYNDTLNGSTEKRSAELPDAVGPIVQLQEKLYVPVKEYPDFNFVGRILGPRGLTAKQLEAETGCKIMVRGKGSMRDKKKEEQNRGKPNWEHLNEDLHVLITVEDAQNRAEIKLKRAVEEVKKLLVPAAEGEDSLKKMQLMELAILNGTYRDANIKSPALAFSLAATAQAAPRIITGPAPVLPPAALRTPTPAGPTIMPLIRQIQTAVMPNGTPHPTAAIVPPGPEAGLIYTPYEYPYTLAPATSILEYPIEPSGVLGAVATKVRRHDMRVHPYQRIVTADRAATGN

SEQ ID NO: 64 - protein, 984 aa, Homo sapiens
MALDYLLLLLLASAVAAMEETLMDTRTATAELGWTANPASGWEEVSGYDENLNTIRTYQVCNVFEPNQNNWLLTTFINRRGAHRIYTEMRFTVRDCSSLPNVPGSCKETFNLYYYETDSVIATKKSAFWSEAPYLKVDTIAADESFSQVDFGGRLMKVNTEVRSFGPLTRNGFYLAFQDYGACMSLLSVRVFFKKCPSIVQNFAVFPETMTGAESTSLVIARGTCIPNAEEVDVPIKLYCNGDGEWMVPIGRCTCKPGYEPENSVACKACPAGTFKASQEAEGCSHCPSNSRSPAEASPICTCRTGYYRADFDPPEVACTSVPSGPRNVISIVNETSIILEWHPPRETGGRDDVTYNIICKKCRADRRSCSRCDDNVEFVPRQLGLTECRVSISSLWAHTPYTFDIQAINGVSSKSPFPPQHVSVNITTNQAAPSTVPIMHQVSATMRSITLSWPQPEQPNGIILDYEIRYYEKEHNEFNSSMARSQTNTARIDGLRPGMVYVVQVRARTVAGYGKFSGKMCFQTLTDDDYKSELREQLPLIAGSAAAGVVFVVSLVAISIVCSRKRAYSKEAVYSDKLQHYSTGRGSPGMKIYIDPFTYEDPNEAVREFAKEIDVSFVKIEEVIGAGEFGEVYKGRLKLPGKREIYVAIKTLKAGYSEKQRRDFLSEASIMGQFDHPNIIRLEGVVTKSRPVMIITEFMENGALDSFLRQNDGQFTVIQLVGMLRGIAAGMKYLAEMNYVHRDLAARNILVNSNLVCKVSDFGLSRYLQDDTSDPTYTSSLGGKIPVRWTAPEAIAYRKFTSASDVWSYGIVMWEVMSFGERPYWDMSNQDVINAIEQDYRLPPPMDCPAALHQLMLDCWQKDRNSRPRFAEIVNTLDKMIRNPASLKTVATITAVPSQPLLDRSIPDFTAFTTVDDWLSAIKMVQYRDSFLTAGFTSLQLVTQMTSEDLLRIGITLAGHQKKILNSIHSMRVQISQSPTAMA

SEQ ID NO: 65 - protein, 254 aa, Homo sapiens
MAAYKLVLIRHGESAWNLENRFSGWYDADLSPAGHEEAKRGGQALRDAGYEFDICFTSVQKRAIRTLWTVLDAIDQMWLPVVRTWRLNERHYGGLTGLNKAETAAKHGEAQVKIWRRSYDVPPPPMEPDHPFYSNISKDRRYADLTEDQLPSCESLKDTIARALPFWNEEIVPQIKEGKRVLIAAHGNSLRGIVKHLEGLSEEAIMELNLPTGIPIVYELDKNLKPIKPMQFLGDEETVRKAMEAVAAQGKAKK

SEQ ID NO: 66 - protein, 67 aa, Homo sapiens
MIIPVRCFTCGKIVGNKWEAYLGLLQAEYTEGDALDALGLKRYCCRRMLLAHVDLIEKLLNYAPLEK

SEQ ID NO: 67 - protein, 430 aa, Homo sapiens
MASSAKSAEMPTISKTLNPTPDPHQEYLDPRITIALFEIGSHSPSSWGSLPFLKNSSHQVTEQQTAQKFNNLLKEIKDILKNMAGFEEKITEAKELFEETNITEDVSAHKENIRGLDKINEMLSTNLPVSLAPEKEDNEKKQEMILETNITEDVSAHKENIRGLDKINEMLSTNLPVSLAPEKEDNEKKQQMIMENQNSENTAQVFARDLVNRLEEKKVLNETQQSQEKAKNRLNVQEETMKIRNNMEQLLQEAEHWSKQHTELSKLIKSYQKSQKDISETLGNNGVGFQTQPNNEVSAKHELEEQVKKLSHDTYSLQLMAALLENECQILQQRVEILKELHHQKQGTLQEKPIQINYKQDKKNQKPSEAKKVEMYKQNKQAMKGTFWKKDRSCRSLDVCLNKKACNTQFNIHVARKALRGKMRSASSLR

SEQ ID NO: 68 - protein, 588 aa, Homo sapiens
MEAADASRSNGSSPEARDARSPSGPSGSLENGTKADGKDAKTTNGHGGEAAEGKSLGSALKPGEGRSALFAGNEWRRPIIQFVESGDDKNSNYFSMDSMEGKRSPYAGLQLGAAKKPPVTFAEKGELRKSIFSESRKPTVSIMEPGETRRNSYPRADTGLFSRSKSGSEEVLCDSCIGNKQKAVKSCLVCQASFCELHLKPHLEGAAFRDHQLLEPIRDFEARKCPVHGKTMELFCQTDQTCICYLCMFQEHKNHSTVTVEEAKAEKETELSLQKEQLQLKIIEIEDEAEKWQKEKDRIKSFTTNEKAILEQNFRDLVRDLEKQKEEVRAALEQREQDAVDQVKVIMDALDERAKVLHEDKQTREQLHSISDSVLFLQEFGALMSNYSLPPPLPTYHVLLEGEGLGQSLGNFKDDLLNVCMRHVEKMCKADLSRNFIERNHMENGGDHRYVNNYTNSFGGEWSAPDTMKRYSMYLTPKGGVRTSYQPSSPGRFTKETTQKNFNNLYGTKGNYTSRVWEYSSSIQNSDNDLPVVQGSSSFSLKGYPSLMRSQSPKAQPQTWKSGKQTMLSHYRPFYVNKGNGIGSNEAP

SEQ ID NO: 69 - protein, 304 aa, Homo sapiens
MIYTMKKVHALWASVCLLLNLAPAPLNADSEEDEEHTIITDTELPPLKLMHSFCAFKADDGPCKAIMKRFFFNIFTRQCEEFIYGGCEGNQNRFESLEECKKMCTRDNANRIIKTTLQQEKPDFCFLEEDPGICRGYITRYFYNNQTKQCERFKYGGCLGNMNNFETLEECKNICEDGPNGFQVDNYGTQLNAVNNSLTPQSTKVPSLFEFHGPSWCLTPADRGLCRANENRFYYNSVIGKCRPFKYSGCGGNENNFTSKQECLRACKKGFIQRISKGGLIKTKRKRKKQRVKIAYEEIFVKNM

SEQ ID NO: 70 - protein, 205 aa, Homo sapiens
MSIMSYNGGAVMAMKGKNCVAIAADRRFGIQAQLVTTDFQKIFPMGDRLYIGLAGLATDVQTVAQRLKFRLNLYELKEGRQIKPYTLMSMVANLLYEKRFGPYYTEPVIAGLDPKTFKPFICSLDLIGCPMVTDDFVVSGTCAEQMYGMCESLWEPNMDPDHLFETISQAMLNAVDRDAVSGMGVIVHIIEKDKITTRTLKARMD

SEQ ID NO: 71 - protein, 412 aa, Homo sapiens
DRGREVSGRRSRVARRSGAFSPAAGPSPKVASVSGSRRVHRPSSLGRIAVVVDQGSGFTKAGFAGENQPRIVLKSSSLVPSWDRPVLPGAPGCELAGGVARAHPIKHGVVADWEALEGLWERLLVGGLRVCPEQWPVLVSDSPLAPPAGRERVAELLFETLAVPACHMASTALLALCSTGAFSGLAVEAGAGVCHATPIYAGHSWHQATFRLNVAGSTLSRYLRDLLVAANPDLLQQALPRKAITHLKKRSCYVSLDFEGDLRDPARHHPASFSVGNGCCVCLSSERFRCPEPIFQPGLLGQAEQGLPALAFRALQKMPKTLRTRLADTVVLAGGSTLFPGFAERLDKELEAQCRRHGYAALRPHLVAKHGRGMAVWTGGSMVASLHSFQRRWITRAMYQECGSRLLYDVFN

SEQ ID NO: 72 - protein, 152 aa, Homo sapiens
MDNVQPKIKHRPFCFSVKGHVKMLRLALTVTSMTFFIIAQAPEPYIVITGFEVTVILFFILLYVLRLDRLMKWLFWPLLDIINSLVTTVFMLIVSVLALIPETTTLTVGGGVFALVTAVCCLADGALIYRKLLFNPSGPYQKKPVHEKKEVL

SEQ ID NO: 73 - protein, 501 aa, Homo sapiens
MAQPHTTSVPYFARSPAPPPPSRSGAPPQPPATLRPSRRRTRPPRPADRRDAPADCAYLWRILTPRRGRARRSDVGARHRACGRRDVLLSRQGPANPEGARRVVGGQERVWPAVRRGRGGSMFRLLSWSLGRGFLRAAGRRCRGCSARLLPGLAGGPGPEVQVPPSRVAPHGRGPGLLPLLAALAWFSRPAAAEEEEQQGADGAAAEDGADEAEAEIIQLLKRAKLSIMKDEPEEAELILHDALRLAYQTDNKKAITYTYDLMANLAFIRGQLENAEQLFKATMSYLLGGGMKQEDNAIIEISLKLASIYAAQNRQEFAVAGYEFCISTLEEKIEREKELAEDIMSVEEKANTHLLLGMCLDACARYLLFSKQPSQAQRMYEKALQISEEIQGERHPQTIVLMSDLATTLDAQGRFDEAYIYMQRASDLARQINHPELHMVLSNLAAVLMHRERYTQAKEIYQEALKQAKLKKDEISVQHIREELAELSKKSRPLTNSVKL

SEQ ID NO: 74 - protein, 649 aa, Homo sapiens
MSLMVSAGRGLGAVWSPTHVQVTVLQARGLRAKGPGGTSDAYAVIQVGKEKYATSVSERSLGAPVWREEATFELPSLLSSGPAAAATLQLTVLHRALLGLDKFLGRAEVDLRDLHRDQGRRKTQWYKLKSKPGKKDKERGEIEVDIQFMRNNMTASMFDLSMKDKSRNPFGKLKDKIKGKNKDSGSDTASAIIPSTTPSVDSDDESVVKDKKKKSKIKTLLSKSNLQKTPLSQSMSVLPTSKPEKVLLRPGDFQSQWDEDDNEDESSSASDVMSHKRTASTDLKQLNQVNFTLPKKEGLSFLGGLRSKNDVLSRSNVCINGNHVYLEQPQPTGEIKDSSPSSSPSPKGFRKKTLFSSTENLAAGSWKEPAEGGGLSTDRDVSESSTKDSLKSMTLPTYRPAPLISGDLREKMAPANSEATKEAKESKKPESRRSSLLSLMTGKKDVAKGSEGENLLTVPGREKEGMLMGVKPGEDASGPAEDLVRRSEKDTAAVVSRQGSSLNLFEDVQITEPEAEPESKSEPRPPISSPRAPQTRAVKPRLHPVKPMNATATKVANCSLGTATIISENLNNEVMMKKYSPSDPAFAYAQLTHDELIQLVLKQKETISKKEFQVRELEDYIDNLLVRVMEETPNILRIPTQVGKKAGKM

SEQ ID NO: 75 - protein, 792 aa, Homo sapiens
MQGEDARYLKRKVKGGNIDVHPSEKALIVHYEVEATILGEMGDPMLGERKECQKIIRLKSLNANTDITSLARKVVEECKLIHPSKLNEVEQLLYYLQNRRDSLSGKEKKEKSSKPKDPPPFEGMEIDEVANINDMDEYIELLYEDIPDKVRGSALILQLARNPDNLEELLLNETALGALARVLREDWKQSVELATNIIYIFFCFSSFSQFHGLITHYKIGALCMNIIDHELKRHELWQEELSKKKKAVDEDPENQTLRKDYEKTFKKYQGLVVKQEQLLRVALYLLLNLAEDTRTELKMRNKNIVHMLVKALDRDNFELLILVVSFLKKLSIFMENKNDMVEMDIVEKLVKMIPCEHEDLLNITLRLLLNLSFDTGLRNKMVQVGLLPKLTALLGNDNYKQIAMCVLYHISMDDRFKSMFAYTDCIPQLMKMLFECSDERIDLELISFCINLAANKRNVQLICEGNGLKMLMKRALKFKDPLLMKMIRNISQHDGPTKNLFIDYVGDLAAQISNDEEEEFVIECLGTLANLTIPDLDWELVLKEYKLVPYLKDKLKPGAAEDDLVLEVVIMIGTVSMDDSCAALLAKSGIIPALIELLNAQQEDDEFVCQIIYVFYQMVFHQATRDVIIKETQAPAYLIDLMHDKNNEIRKVCDNTLDIIAEYDEEWAKKIQSEKFRWHNSQWLEMVESRQMDESEQYLYGDDRIEPYIHEGDILERPDLFYNSDGLIASEGAISPDFFNDYHLQNGDVVGQHSFPGSLGMDGFGQPVGILGRPATAYGFRPDEPYYYGYGS

SEQ ID NO: 76 - protein, 242 aa, Homo sapiens
MGEASPPAPARRHLLVLLLLLSTLVIPSAAAPIHDADAQESSLGLTGLQSLLQGFSRLFLKGNLLRGIDSLFSAPMDFRGLPGNYHKEENQEHQLGNNTLSSHLQIDKMTDNKTGEVLISENVVASIQPAEGSFEGDLKVPRMEEKEALVPIQKATDSFHTELHPRVAFWIIKLPRRRSHQDALEGGHWLSEKRHRLQAIRDGLRKGTHKDVLEEGTESSSHSRLSPRKTHLLYILRPSRQL

SEQ ID NO: 77 - protein, 175 aa, Homo sapiens
MDIAIHHPWIRRPFFPFHSPSRLFDQFFGEHLLESDLFPTSTSLSPFYLRPPSFLRAPSWFDTGLSEMRLEKDRFSVNLDVKHFSPEELKVKVLGDVIEVHGKHEERQDEHGFISREFHRKYRIPADVDPLTITSSLSSDGVLTVNGPRKQVSGPERTIPITREEKPAVTAAPKK

SEQ ID NO: 78 - protein, 237 aa, Homo sapiens
MTRCPAGQAEVEMAELYVKPGNKERGWNDPPQFSYGLQTQAGGPRRSLLTKRVAAPQDGSPRVPASETSPGPPPMGPPPPSSKAPRSPPVGSGPASGVEPTSFPVESEARLMEDVLRPLEQALEDCRGHTRKQVCDDISRRLALLQEQWAGGKLSIPVKKRMALLVQELSSHRWDAADDIHRSLMVDHVTEVSQWMVGVKRLIAEKRSLFSEEAANEEKSAATAEKNHTIPGFQQAS

SEQ ID NO: 79 - protein, 1220 aa, Homo sapiens
MKLKEVDRTAMQAWSPAQNHPIYLATGTSAQQLDATFSTNASLEIFELDLSDPSLDMKSCATFSSSHRYHKLIWGPYKMDSKGDVSGVLIAGGENGNIILYDPSKIIAGDKEVVIAQNDKHTGPVRALDVNIFQTNLVASGANESEIYIWDLNNFATPMTPGAKTQPPEDISCIAWNRQVQHILASASPSGRATVWDLRKNEPIIKVSDHSNRMHCSGLAWHPDVATQMVLASEDDRLPVIQMWDLRFASSPLRVLENHARGILAIAWSMADPELLLSCGKDAKILCSNPNTGEVLYELPTNTQWCFDIQWCPRNPAVLSAASFDGRISVYSIMGGSTDGLRQKQVDKLSSSFGNLDPFGTGQPLPPLQIPQQTAQHSIVLPLKKPPKWIRRPVGASFSFGGKLVTFENVRMPSHQGAEQQQQQHHVFISQVVTEKEFLSRSDQLQQAVQSQGFINYCQKKIDASQTEFEKNVWSFLKVNFEDDSRGKYLELLGYRKEDLGKKIALALNKVDGANVALKDSDQVAQSDGEESPAAEEQLLGEHIKEEKEESEFLPSSGGTFNISVSGDIDGLITQALLTGNFESAVDLCLHDNRMADAIILAIAGGQELLARTQKKYFAKSQSKITRLITAVVMKNWKEIVESCDLKNWREALAAVLTYAKPDEFSALCDLLGTRLENEGDSLLQTQACLCYICAGNVEKLVACWTKAQDGSHPLSLQDLIEKVVILRKAVQLTQAMDTSTVGVLLAAKMSQYANLLAAQGSIAAALAFLPDNTNQPNIMQLRDRLCRAQGEPVAGHESPKIPYEKQQLPKGRPGPVAGHHQMPRVQTQQYYPHGENPPPPGFIMHGNVNPNASGQLPTSPGHMHTQVPPYPQPQPYQPAQPYPFGTGGSAMYRPQQPVAPPTSNAYPNTPYISSASSYTGQSQLYAAQHQASSPTSSPATSFPPPPSSGASFQHGGPGAPPSSSAYALPPGTTGTLPAASELPASQRTGPQNGWNDPPALNRVPKKKKMPENFMPPVPITSPIMNPLGDPQSQMLQQQPSAPVPLSSQSSFPQPHLPGGQPFHGVQQPLGQTGMPPSFSKPNIEGAPGAPIGNTFQHVQSLPTKKITKKPIPDEHLILKTTFEDLIQRCLSSATDPQTKRKLDDASKRLEFLYDKLREQTLSPTITSGLHNIARSIETRNYSEGLTMHTHIVSTSNFSETSAFMPVLKVVLTQANKLGV

SEQ ID NO: 80 - protein, 1186 aa, Homo sapiens
MSVACVLKRKAVLWQDSFSPHLKHHPQEPANPNMPVVLTSGTGSQAQPQPAANQALAAGTHSSPVPGSIGVAGRSQDDAMVDYFFQRQHGEQLGGGGSGGGGYNNSKHRWPTGDNIHAEHQVRSMDELNHDFQALALEGRAMGEQLLPGKKFWETDESSKDGPKGIFLGDQWRDSAWGTSDHSVSQPIMVQRRPGQSFHVNSEVNSVLSPRSESGGLGVSMVEYVLSSSPGDSCLRKGGFGPRDADSDENDKGEKKNKGTFDGDKLGDLKEEGDVMDKTNGLPVQNGIDADVKDFSRTPGNCQNSANEVDLLGPNQNGSEGLAQLTSTNGAKPVEDFSNMESQSVPLDPMEHVGMEPLQFDYSGTQVPVDSAAATVGLFDYNSQQQLFQRPNALAVQQLTAAQQQQYALAAAHQPHIGLAPAAFVPNPYIISAAPPGTDPYTAGLAAAATLGPAVVPHQYYGVTPWGVYPASLFQQQAAAAAAATNSANQQTTPQAQQGQQQVLRGGASQRPLTPNQNQQGQQTDPLVAAAAVNSALAFGQGLAAGMPGYPVLAPAAYYDQTGALVVNAGARNGLGAPVRLVAPAPVIISSSAAQAAVAAAAASANGAAGGLAGTTNGPFRPLGTQQPQPQPQQQPNNNLASSSFYGNNSLNSNSQSSSLFSQGSAQPANTSLGFGSSSSLGATLGSALGGFGTAVANSNTGSGSRRDSLTGSSDLYKRTSSSLTPIGHSFYNGLSFSSSPGPVGMPLPSQGPGHSQTPPPSLSSHGSSSSLNLGGLTNGSGRYISAAPGAEAKYRSASSASSLFSPSSTLFSSSRLRYGMSDVMPSGRSRLLEDFRNNRYPNLQLREIAGHIMEFSQDQHGSRFIQLKLERATPAERQLVFNEILQAAYQLMVDVFGNYVIQKFFEFGSLEQKLALAERIRGHVLSLALQMYGCRVIQKALEFIPSDQQNEMVRELDGHVLKCVKDQNGNHVVQKCIECVQPQSLQFIIDAFKGQVFALSTHPYGCRVIQRILEHCLPDQTLPILEELHQHTEQLVQDQYGNYVIQHVLEHGRPEDKSKIVAEIRGNVLVLSQHKFASNVVEKCVTHASRTERAVLIDEVCTMNDGPHSALYTMMKDQYANYVVQKMIDVAEPGQRKIVMHKIRPHIATLRKYTYGKHILAKLEKYYMKNGVDLGPICGPPNGII

SEQ ID NO: 81 - protein, 178 aa, Homo sapiens
MEALNTAQGARDFIYSLHSTERSCLLKELHRFESIAIAQEKLEAPPPTPGQLRYVFIHNAIPFIGFGFLDNAIMIVAGTHIEMSIGIILGISTMAAAALGNLVSDLAGLGLAGYVEALASRLGLSIPDLTPKQVDMWQTRLSTHLGKAVGVTIGCILGMFPLIFFGGGEEDEKLETKS

SEQ ID NO: 82 - protein, 612 aa, Homo sapiens
MADNKGTENDWFLVEATDCEETLEETSLGDLDNVSCVSDLSDLLDEAPQSQGNSLELFHKQESLESEQELNALKRKLLYSPQARSADETDIASISPRLETISITKQDKKRYRRQLFSQDDSGLELSLLQDETENIDESTQVDQQQKEHTGEVGAAGVNILKASNIRAALLSRFKDTAGVSFTDLTRSYKSNKTCCGDWVLAVWGVRENLIDSVKELLQTHCVYIQLEHAVTEKNRFLFLLVRFKAQKSRETVIKLITTILPVDASYILSEPPKSRSVAAALFWYKRSMSSTVFTWGTTLEWIAQQTLINHQLDSESPFELCKMVQWAYDNGHTEECKIAYYYAVLADEDENARAFLSSNSQAKYVKDCAQMVRHYLRAEMAQMSMSEWIFRKLDNVEGSGNWKEIVRFLRFQEVEFISFMIAFKDLLCGKPKKNCLLIFGPPNTGKSMFCTSLLKLLGGKVISYCNSKSQFWLQPLADAKIGLLDDATKPCWDYMDIYMRNALDGNTICIDLKHRAPQQIKCPPLLITSNIDVKSDTCWMYLHSRISAFKFAHEFPFKDNGDPGFSLTDENWKSFFERFWQQLELSDQEDEGNDGKPQQSLRLTARAANEPI

SEQ ID NO: 83 - protein, 455 aa, Homo sapiens
MKPRARRRKRASATQLYQTCKATGTCPPDVIPKVEHTTIADQILKWGSLGVFFGGLGIGTGAGSGGRAGYIPLGSSPKPAITGGPAARPPVLVEPVAPSDPSIVSLIEESAIINAGAPEVVPPTQGGFTITSSESTTPAILDVSVTNHTTTSVFQNPLFTEPSVIQPQPPVEASGHILISAPTITSQHVEDIPLDTFVVSSSDSGPTSSTPLPRAFPRPRVGLYSRALQQVQVTDPAFLSTPQRLVTYDNPVYEGEDVSLQFTHESIHNAPDEAFMDIIRLHRPAITSRRGLVRFSRIGQRGSMYTRSGQHIGARIHYFQDISPVTQAAEEIELHPLVAAENDTFDIYAEPFDPIPDPVQHSVTQSYLTSTPNTLSQSWGNTTVPLSIPSDWFVQSGPDITFPTASMGTPFSPVTPALPTGPVFITGSDFYLHPTWYFARRRRKRIPLFFTDVAA

SEQ ID NO: 84 - protein, 341 aa, Homo sapiens
MAKGLLVTYALWAVGGPAGLHHLYLGRDSHALLWMLTLGGGGLGWLWEFWKLPSFVAQANRAQGQRQSPRGVTPPLSPIRFAAQVIVGIYFGLVALISLSSMVNFYIVALPLAVGLGVLLVAAVGNQTSDFKNTLGSAFLTSPIFYGRPIAILPISVAASITAQRHRRYKALVASEPLSVRLYRLGLAYLAFTGPLAYSALCNTAATLSYVAETFGSFLNWFSFFPLLGRLMEFVLLLPYRIWRLLMGETGFNSSCFQEWAKLYEFVHSFQDEKRQLAYQVLGLSEGATNEEIHRSYQELVKVWHPDHNLDQTEEAQRHFLEIQAAYEVLSQPRKPWGSRR

SEQ ID NO: 85 - DNA, 1110 bp, Homo sapiens
ctttccgctcggctgttttcctgcgcaggagccgcagggccgtaggcagccatggcgcccagccggaatggcatggtcttgaagccccacttccacaaggactggcagcggcgcgtggccacgtggttcaaccagccggcccgtaagatccgcagacgtaaggcccggcaagccaaggcgcgccgcatcgccccgcgccccgcgtcgggtcccatccggcccatcgtgcgctgccccacggttcggtaccacacgaaggtgcgcgccggccgcggcttcagcctggaggagctcagggtggccggcattcacaagaaggtggcccggaccatcggcatttctgtggatccgaggaggcggaacaagtccacggagtccctgcaggccaacgtgcagcggctgaaggagtaccgctccaaactcatcctcttccccaggaagccctcggcccccaagaagggagacagttctgctgaagaactgaaactggccacccagctgaccggaccggtcatgcccgtccggaacgtctataagaaggagaaagctcgagtcatcactgaggaagagaagaatttcaaagccttcgctagtctccgtatggcccgtgccaacgcccggctcttcggcatacgggcaaaaagagccaaggaagccgcagaacaggatgttgaaaagaaaaaataaagccctcctggggacttggaatcagtcggcagtcatgctgggtctccacgtggtgtgtttcgtgggaacaactgggcctgggatggggcttcactgctgtgacttcctcctgccaggggatttggggctttcttgaaagacagtccaagccctggataatgctttactttctgtgttgaagcactgttggttgtttggttagtgactgatgtaaaacggttttcttgtggggaggttacagaggctgacttcagagtggacttgtgttttttctttttaaagaggcaaggttgggctggtgctcacagctgtaatcccagcactttgaggttggctgggagttcaagaccagcctggccaacatgtcagaactactaaaaataaagaaatcagccatgaaaaaaaaaaaaaaaaaaaaaaaaa

SEQ ID NO: 86 - DNA, 3101 bp, Homo sapiens
gagggttgaatgtaagatggcgcccagggagctgtgaggagaaaaccctgtcggtcttggagcgacgacggcagaaccagggtccctggcggtgcggcggggccggcgggtgcagcggaggcggcggcggcggcggcagtgacgtcgccggaatattagaagtcttaagaactcaggacaagcagcagaaatacatgcaacatggtgactggaaccctaaggactctgcaatatgaataattccctagagaacaccatctcctttgaagagtacatccgagtaaaggcacggtctgtcccgcaacacaggatgaaggaatttctggactcactggcctctaaggggccagaagcccttcaggagttccagcagacagccaccactaccatggtgtaccaacagggtgggaactgcatatacacagacagcactgaagtggctgggtctttgcttgaacttgcctgtccagtcaccaccagtgttcagccacaaacccagcaagaacagcagatccaggttcagcagccgcagcaggttcaggtccaggtgcaggtacagcagtctccgcaacaggtctcggctcagctctccccacaactcaccgttcaccagcctactgagcaacccatccaggtccaggtgcagatccaaggccaggcaccacagtcagcagccccctccattcagaccccgtctctgcagagtcccagtccctcgcagctgcaagcagctcagatccaggtgcagcacgtgcaagcagcccagcagatccaggctgcagaaatcccggaggagcacatcccacatcagcaaatccaggctcagctggtggctggccagtctcttgctggtggtcagcagatccaaatccagaccgtgggtgccctttccccaccaccatcccagcagggctcaccccgggaaggggagcggcgggttggcacggccagtgtcctccaaccagtgaagaagcgcaaagtggagatgcccatcactgtgtcctacgccatctcagggcagccggtggccaccgtgctggccattccacagggccagcagcagagttatgtgtctttgaggccagacttactgacagtagacagtgcccacctgtacagtgccactgggaccattactagccctacaggagaaacctggaccatccctgtttattctgcccagccccggggggaccctcagcagcagagcattacccacattgccattccccaggaagcctacaacgcagttcacgtcagtggctcacccacagccctggcagctgttaagctggaggatgacaaggagaagatggtgggcaccacatctgtagtgaaaaactcccatgaagaggtagtgcagacccttgcaaactctctctttccagcacagttcatgaatggcaacatccacattccagtggctgtgcaggctgtggcaggcacgtaccagaatacggctcaaactgtccatatatgggacccccaacagcagccgcagcagcaaactccccaggaacagacaccaccaccacagcagcagcagcagcaactccaagttacttgttcagctcaaactgtccaggttgctgaagttgaaccacagtcacagccacagccttccccagaacttctgcttccaaattctttgaagccagaagaagggcttgaagtatggaaaaactgggcccagaccaagaatgctgaactagagaaggatgctcagaacagattggcacccattgggaggcgccaactgctgcgattccaggaagatctcatctcctctgctgtggcagagttgaattatgggctctgtctaatgacacgggaagctcgaaatggagaaggtgaaccctatgacccagatgtgctctactatattttcctgtgtattcaaaagtatctttttgaaaatggaagggtagatgacattttctccgatctttattatgttcggttcacggagtggctacatgaagttctgaaggatgttcagccccgggtcactccacttggctatgtcttgcccagccacgtgactgaggagatgctatgggagtgcaagcagcttggggctcactccccctccaccttgctgaccaccctcatgttctttaataccaagtacttcctattgaagacagtggaccagcacatgaagctggccttctccaaggtcttgcgacagacaaagaagaacccctctaatcccaaggataaaagcacgagtatccggtacttgaaggcccttggaatacaccagactggccagaaagttacagatgacatgtatgcagaacagacggaaaatccagagaatccattgagatgtcccatcaagctctatgatttctacctcttcaaatgcccccagagtgtgaaaggccggaatgacaccttttacctgacacctgagccagtggtggcccccaacagcccaatctggtactcagtccagcctatcagcagagagcagatgggacaaatgctgacgcggatcctggtgataagagaaattcaggaggccatcgcagtggccaatgcaagcactatgcactgagatgccttggccatggcacaagagaaaccagccaggaaaaaccagacagactttcacactaaagaagaggcctccatttttttttttcttttttttattggtgtagttacgaagcctttcaggctgcttctgtttaaaatataaaagaaaactttgccccctttgcatcttcataaacctgctgcggcagactcctcagccgatggtggctctgggtttccttgagtgtcatatgtcccagaaagttgctggctgactcttttttgtctggggcctggggaaagggcttggactgtgaaaagaaatgtggcccctttccatcttcaagagagatggaattaatgatggatggaccctggagggaatctccccagccgacttccactgggctgacagactttgctgaccacaggggaacgatgttcttttctttcttcatgatcagacataaacttagcatcttaatggaagaaaaatgaggggaacttcaattatgatttattaaagacaatttctattaaaaaaaaaaaaaaaaaaa

SEQ ID NO: 87 - DNA, 1522 bp, Homo sapiens
agtcgctatgcgtgtcttgtgggtgagggagggcagaaagggagagtgctgggcgggcttagtcggagattgaggactgggaatccgcttccgggagggcactgtctagtgcacaggcaacctggccttcgcctcctagcccgagaagccgaatctccctaatccctgtgacctgtgtcacctctgcatcgcgaggagggggataagtggggagaagtctggtgtcagatgggatggcgccggaagagggtgccacagcggggacggaaggcgcccccaccccaactccacgggaatataaacaatttgtattttccgatcaggtggcgggacaggcttcattgggacagccctaacccagctgctgaatgccagaggcacgaagtgacgttggtctcccgaaagcccgggcccggccggatcacgtgggatgagctcgctgcatcggggctgccgagctgcgatgccgccgtcaacctggccggagagaacatcctcaaccctctccgaagatggaatgaaaccttccaaaaagaggttctcggcagccgcctagagaccacccaattgctggctaaagccatcaccaaagccccacaaccccccaaggcctgggtcttagtcacaggtgtagcttactaccagcccagtctgactgcggagtatgatgaagacagcccaggaggggactttgactttttctccaacctcgtaaccaaatgggaagctgcagccaggcttcctggagattctacacgccaggtggtggtgcgctcaggggttgtgctgggccgtgggggtggtgccatgggccacatgctgctgccctttcgcctgggcctggggggccccatcggctcaggccaccaattcttcccctggatacacatcggggacctggcaggaatcctgacccatgcccttgaagcaaaccacgtgcacggggtcctgaatggagtggctccatcctccgccactaatgctgagtttgcccagaccttgggtgctgccctgggccgccgagccttcatccctctccccagcgctgtggtgcaagctgtctttgggcgacagcgtgccatcatgctgctggagggccagaaggtgatcccacagcgaacactggccactggctaccagtattccttcccagagctaggggctgccttaaaggaaattgtagcctaagtaggtcgtggcaagggcctgaggcctgttcctcacaggcttccaggttaggcactgtgaataggctcagctcctctagagagctgaagccatctggttcttagattcctctcccagtcctctttcccattgttctgttgctccaccttattgtctcaaggccgtaatctcatcaggttgggacattaatcttttcaactccttgtaagatttcccagtttggtttctctacatgtcctgcagctgccccacttctcctttacgctgtgtagagaatgctctgcagtttaggcaataaaaataaattgtctcactaaaaaaaaaaaaaaaaaaa

SEQ ID NO: 88 - DNA, 428 bp, Homo sapiens
aaaaataagtaggaagtgctcaattttaatttggttcagttttccggagggcgagctgagccctggccgccgccacaatgggccgcgagtttgggaatctgacgcggatgcggcatgtgatcagctacagcttgtcaccgttcgagcagcgcgcctatccgcacgtcttcactaaaggaatccccaatgttctgcgccgcattcgggagtctttctttcgcgtggtgccgcagtttgtagtgttttatcttatctacacatgggggactgaagagttcgagagatccaagaggaggatccagctgcctatgaaaatgacaaatgagcaacgcatccggatgacggttccctgtctctgaaagacctttctctggaagaggagtctgcattgtagtgtctcaaagacacaataaacttcctatggtctg

SEQ ID NO: 89 - DNA, 4746 bp, Homo sapiens
gccagcatcccttgtcccgcggccggctcagacaacaaaagcggaagatgctgcagttgggcaaggtcaggaccttgccttgaaagccgggcggcgccgcgcaacgcctcttcccggactgaggagctgtcgccggcggagggtgcatgtttgcgaggaagccgccgggcgccgcgcctttgggagctatgcctgttccagaccagccttcatcagcctcagagaagacgagttccctgagccccggcttaaacacctccaacggggatggctctgaaacagaaaccacctctgccatcctcgcctcagtcaaagaacaggaattacagtttgaaaggctgacccgagagctggaggctgaacggcagatcgtagccagccagctggagcgatgcaagctcggatccgagactggcagcatgagcagcatgagttcagcagaagagcagtttcagtggcagtcacaagatggtcaaaaagatatcgaagatgagcttacaacaggtctcgagctggtggactcctgtattaggtcactacaggaatcaggaatacttgacccacaggattattctacaggtgaaaggcccagcctgctctcccagagtgcacttcagctcaattccaaacctgaagggtctttccagtatccggccagctaccatagcaaccagaccctggccctgggggaaaccaccccttcacagctcccggcccgaggcacacaagcccgagctacgggccagagcttcagccagggcacgaccagccgcgccggccacctggcggggcccgagcccgcgccgccgccgccgccgccgccgcgggagccgttcgcgcccagcctgggcagcgccttccacctgcccgacgcgccgcccgccgccgccgccgccgcgctctactactccagctccacgctgcccgcgccgccgcgcgggggctccccgctggccgcgccccagggcggttcgcccaccaagctgcagcgcggcggctcggcccccgagggcgccacctacgccgcgccgcgcggctcctcgcccaagcagtcgcccagccgcctggccaagtcctacagcaccagctcgcccatcaacatcgtcgtgtcctcggccggcctgtccccgatccgcgtgacctcgccccccaccgtgcagtccaccatctcctcctcgcccatccaccagctgagctccaccatcggcacgtacgccaccctgtcgcccaccaagcgcctggtccacgcgtccgagcagtacagcaagcactcgcaggagctgtatgccacggccaccctccagaggccgggcagcctggcagctggttcccgagcctcatacagcagccagcatgggcacctgggcccagagttgcgggccctgcagtccccagaacaccacatagatcccatctatgaagaccgcgtctatcagaagccccctatgaggagtctcagccagagccagggggaccctctgccgccagcacacaccggcacctaccgcacgagcacagccccatcttcccctggtgtcgactccgtccccttgcagcgcacaggcagccagcacggcccacagaatgccgccgcggccaccttccagagggccagctatgccgccggcccagcctccaattacgcggacccctaccgacagctgcagtattgtccctctgttgagtctccatacagcaaatccggccctgctctcccgcctgaaggcaccttggccaggtccccgtccattgatagcattcagaaagatcccagagaatttggatggagagacccggaactgccggaagtgattcagatgttgcagcaccagtttccctcggtccagtctaacgcggcagcctacttgcaacacctctgttttggagacaacaaaattaaagccgagataaggagacaaggaggcatccagctcctggtggacctgttggatcatcggatgaccgaagtccaccgtagtgcctgtggagctctgagaaacctggtgtatgggaaggccaacgatgataacaaaattgccctgaaaaactgtggtggcatcccagcactggtgaggttactccgcaagacgactgacctggagatccgggagctggtcacaggagtcctttggaacctctcctcatgcgatgcactcaaaatgccaatcatccaggatgccctagcagtactgaccaacgcggtgattatcccccactcaggctgggaaaattcgcctcttcaggatgatcggaaaatacagctgcattcatcacaggtgctgcgtaacgccaccgggtgcctaaggaatgttagttcggccggagaggaggcccgcagaaggatgagagagtgtgatgggcttacggatgccttgctgtacgtgatccagtctgcgctggggagcagtgagatcgatagcaagaccgttgaaaactgtgtgtgcattttaaggaacctctcgtaccggctggcggcagaaacgtctcagggacagcacatgggcacggacgagctggacgggctactctgtggcgaggccaatggcaaggatgctgagagctctgggtgctggggcaagaagaagaagaaaaagaaatcccaagatcagtgggatggagtaggacctcttccagactgtgctgaaccaccaaaagggatccagatgctgtggcacccatcaatagtcaaaccctacctcacactgctctctgagtgctcaaatccagacacgctggaaggggcggcaggcgccctgcagaacttggctgcagggagctggaagtggtcagtatatatccgagccgctgtccgaaaagagaaaggcctgcccatcctcgtggagctgctccgaatagacaatgaccgtgtggtgtgcgcggtggccactgcgctgcggaacatggccttggacgtcagaaataaggagctcatcggcaaatacgccatgcgagacctagtccacaggcttccaggagggaacaacagcaacaacactgcaagcaaggccatgtcggatgacacagtgacagctgtctgctgcacactgcacgaagtgattaccaagaacatggagaacgccaaggccttacgggatgccggtggcatcgagaagttggtcggcatctccaaaagcaaaggagataaacactctccaaaagtggtcaaggctgcatctcaggtcctcaacagcatgtggcagtaccgagatctgaggagtctctacaaaaaggatggatggtcacaataccactttgtagcctcgtcttcaaccatcgagagggaccggcaaaggccctactcctcctcccgcacgccctccatctcccctgtgcgcgtgtctcccaacaaccgctcagcaagtgccccagcttcacctcgggaaatgatcagcctcaaagaaaggaaaacagactacgagtgcaccggcagcaacgccacctaccacggagctaaaggcgaacacacttccaggaaagatgccatgacagctcaaaacactggaatttcaactttgtataggaattcttatggtgcgcccgctgaagacatcaaacacaaccaggtttcagcacagccagtcccacaggagcccagcagaaaagattacgagacctaccagccatttcagaattccacaagaaattacgatgagtccttcttcgaggaccaggtccaccatcgccctcccgccagcgagtacaccatgcacctgggtctcaagtccaccggcaactacgttgacttctactcagctgcccgtccctacagtgaactgaactatgaaacgagccactacccggcctcccccgactcctgggtgtgaggagcagggcacaggcgctccgggaacagtgcatgtgcatgcataccacaagacatttctttctgttttgtttttttctcctgcaaatttagtttgttaaagcctgttccataggaaggctgtgataaccagtaaggaaatattaagagctattttagaaagctaaatgaatcgcaagttaacttggaaatcagtagaaagctaaagtgatcctaaatatgacagtgggcagcacctttctagcgtgagctgtaaagtaacgagaagtgctttatactgaacgtggttgatgggaggagagacgaggcattcgggccggtggggcgtaagggttatcgttaagcacaagacacagaatagtttacacactgtgtgggggacggcttctcacgctttgtttactctcttcatccgttgtgactctaggcttcaggttgcattggggttcctctgtacagcaagatgtttcttgccttttgttaatgcattgttgtaaagtatttgatgtacattacagattaaagaagaaaagcgcgttgtgtatattacaccaatgccgccgtgtttcctcatctatggttctaaatattgcttcaatttcaaacttttgaaagatgtatggatttccagtttttctttactttctcccagtatgttttaacaaaaaaaaaaaaaagcaggaaaaaaggaatatttagcagtattgttcgttctgatatgtgaatttgtttgtgacaactaaacaaggcattcagcagtttctgacaattaacatacatcattccacactccttgtcaacaaagtgctttttcactgcctaaaattttagatgtagatatttgaaatagattttttcatttataccagttttctttatgatgatacagtgttaaaagaaaataaattacaattgatctgtca

SEQ ID NO: 90 - DNA, 1278 bp, Homo sapiens
aatggaggaagactggacctactgattcaacttggagatgagcgggtctgtcctcttcacggcgggagagaggtggagatgctttctgaccccgtcgaggtcatccctgtactgggccttacataatttctgctgtcggaaaaaatccactacacctaagaaaattactcccaatgttactttttgtgatgaaaatgcaaaggagcccgaaaatgcacttgacaagctcttctcttcagaacagcaggcttccatcttgcatgtgttgaatacagcatctactaaagaacttgaagctttccgattgcttcgtggaagaaggtccatcaatatcgtagagcacagagaaaactttgggccatttcagaatttagagagtttaatgaatgtgcccttgtttaagtataaaagtacagttcaagtttgtaactccatactttgtccaaagactggacgggaaaaaagaaagtcaccggaaaaccggttcctgagaaagctcctcaaaccagacatagaaagagaaagacttaagaattgcctgggctcaccttgatcgtaagttgacagtgctggactggcagcaaagtgaccgttggagtttaatgagaggaatatactcatcatcagtctatttagaagagatttcctcgatcatttcaaagatgcctaaagcagatttctatgttctggaaaaaacaggactatccattcagaactcatctctgtttccaatactgttacattttcatatcatggaagccatgctgtatgccttattaaataaaacttttgcccaggatgggcagcatcaggtgctgagcatgaatcgaaatgcagtggggaagcattttgaactgatgattggtgactcccggactagtggaaaagagctagtgaagcagtttctcttcgattctatactgaaggcggatcctcgggtgttcttcccatcagataaaatagttcactacagacagatgtttttatctactgaactacaaagagtagaagagctttatgattcattattacaagctattgccttctatgaattagcagtgtttgactctcagccttagaattctgaggttaacgtgctaaagtataattattagctctaacgtaacaccaactgttgtgaacatccatgttattggaaaagaacacattttcagtgtattttagatgtttaaattctgacttttggctattaaatggtttacacaataagccaagaccaaatcaataaacattttatgagaaaaaaaaaaaaaaaaa

SEQ ID NO: 91 - DNA, 1863 bp, Homo sapiens
ggcacgaggcaggggctctgctgcgacctttacggtagtgaggttagggacgatgggagagcagctttgttcctgaagtgccgtcgaggattaggatcgagtttcttcgatcgtgagggcaattattagtggcctctagccccccagatggcatcttgaggagagagaatccacgctacgagaactaacatagtggacatcgcagttgtccgtagccgatttgcgggttacggagttgttgcaagtaaagaaggggaaatccgagcgttctcgcgttggatttcctccacgtgtgaagtgggaatggtagtgatatctcgtgctatctctgtcaagggcaagaaggagaaggaatttatttgaggccctacgacgtggtgcggtggctcacgcctgtaatcccaacactttgggaggccgaggcaggcggatcatctgagatcgagagttcgagaccagcttgaccaacatggagaaaccccgtctctactaaaagtacaaaattagccaggcatggtggcacatgcccgtaatcccagctactcgggaggctgaggcaggagagtagcttgagcccaggaggcggaggttgtggtgagccgagatcgcgccattgcacagcctgggcaacgagcgaaactccatctcaaaaaaataaataaaaatttttttaaaaaaaaaaaaaaaaaactcgaggcaaaactaaccccctaataaaattaattaaccactcattcatcgacctccccaccccatccaacatctccgcatgatgaaacttcggctcactccttggcgcctgcctgatcctccaaatcaccacaggactattcctagccatgcactactcaccagacgcctcaaccgccttttcatcaatcgcccacatcactcgagacgtaaattatggctgaatcatccgctaccttcacgccaatggcgcctcaatattctttatctgcctcttcctacacatcgggcgaggcctatattacggatcatttctctactcagaaacctgaaacatcggcattatcctcctgcttgcaactatagcaacagccttcataggctatgtcctcccgtgaggccaaatatcattctgaggggccacagtaattacaaacttactatccgccatcccatacattgggacagacctagttcaatgaatctgaggaggctactcagtagacagtcccaccctcacacgattctttacctttcacttcatcttgcccttcattattgcagccctagcagcactccacctcctattcttgcacgaaacgggatcaaacaaccccctaggaatcacctcccattccgataaaatcaccttccacccttactacacaatcaaagacgccctcggcttacttctcttccttctctccttaatgacattaacactattctcaccagacctcctaggcgacccagacaattataccctagccaaccccttaaacacccctccccacatcaagcccgaatgatatttcctattcgcctacacaattctccgatccgtccctaacaaactaggaggcgtccttgccctattactatccatcctcatcctagcaataatccccatcctccatatatccaaacaacaaagcataatatttcgcccactaagccaatcactttattgactcctagccgcagacctcctcattctaacctgaatcggaggacaaccagtaagctacccttttaccatcattggacaagtagcatccgtactatacttcacaacaatcctaatcctaataccaactatctccctaattgaaaacaaaatactcaaatgggcctaaaaaaaaaaaaaaaaaaaaaaaaaaaaaaaaaaaaaaa

SEQ ID NO: 92 - DNA, 796 bp, Homo sapiens
ccgcggccgctcgcagcttgctggcctctcccgcgcctcacgtcggactccgtctccgcggcaggaagcagcatggaagctgaggacatccaggaggagttgacctgccccatctgcctggactatttccaggacccggtgtccatcgagtgcggacacaacttctgccgcggctgcctgcaccgcaacatgggcgccgggcggcaggaccgtatcccctgccccgaatgtcggcacccatcggcgcccgccgcgctgcagacccaactgggccctggccaggctgactgagaagacgcagcgccggcgcctgggccccgtgcccccgggcctgtgcggccgccactgggagccgctgcggctcttctgcgaggacgaccagcggccagtgtgcctggtgtgcagggagtcccaggagcaccagactcacgccatggcacccatcgacgaggcttcgagagctaccgggagaaacttcttaagtctcagcgtactctcgtggccaacgatgacgcacacgtcatgcatttacaggatgtcgacagtgacgaaccgccacacacgtggcaggataacgcatacggagtcacgcgaaatgagacatcacgcacggcgtttttaacagcgtggcaccacttcctggttgaagaacgaggacctgtctcttccagcagcttgcacaacgaagaagcacagaccagcacgacgctgaatgacaccacttcacactccgtccacttcgctcctgagaccctcttaaggggggacaacccgcccccctgggcgtcacacccca

SEQ ID NO: 93 - DNA, 880 bp, Homo sapiens
aacggtgcgctggagcgagtgagcagcgatacctagggcggaagtgctctcggcggaagtgatcgctgtgtgaatcgtgggtgggatggccgcgggccgcctctttctaagtcggcttcgagcacccttcagttccatggccaagagcccactcgagggcgtttcctcctccagaggcctgcacgcggggcgcgggccccgaaggctctccatcgaaggcaacattgctgtgggaaagtccacgtttgtgaagttactcacgaaaacttacccagaatggcacgtagctacagaacctgtagcaacatggcagaatatccaggctgctggcacccaaaaagcctgcactgcccaaagtcttggaaacttgctggatatgatgtaccgggagccagcacgatggtcctacacattccagacattttcctttttgagccgcctgaaagtacagctggagcccttccctgagaaactcttacaggccaggaagccagtacagatctttgagaggtctgtgtacagtgacaggctccactttgaggctctgatgaacattccagtgctggtgttggatgtcaatgatgatttttctgaggaagtaaccaaacaagaagacctcatgagagaggtaaacacctttgtaaagaatctgtaaccaataccatgaagttcaggctgtgatctgggctccctgactttctgaagctagaaaaatgttgtgtctcccaaccacctttccatccccagcccctctcatccctggagcactctgccgctcaagagctggtttgttaattattgttagactttgccattgttttcttttgtacctgaagcattttgaaaataaagtttacttaagttatgcttgtttttctaa

SEQ ID NO: 94 - DNA, 324 bp, Homo sapiens
atggtagtaccaatcattgggaagtatgttatggcagcacagttatatgttctcctgcatctgtatctagcactgtacgagaagtatccattgctgaacctactacatacacccccgcacagaccaccgcccctacagtgtccgcctgcaccacggaagacggcgtgtcggcgccgcctaggaagcgagcacgtggaccgtccactaacaacaccctgtgtgtggccaacatcagatccgtggacagtacaatcaacaacatcgtcactgacaattacaacaagcaccaaagaaggaacaactgtcacagtgcagctacgccta

SEQ ID NO: 95 - DNA, 1104 bp, Homo sapiens
atggaagcaatagccaagcgtttagatgcgtgccaggatcagttgttagaactttatgaagaaaacagtattgatatacacaaacacattatgcattggaaatgcatacgattggaaagtgtattactacacaaagcaaaacaaatgggcctgagccacatcgggttacaagtagtaccaccattaactgtgtcagagactaaaggacataatgctattgaaatgcaaatgcatttagaatccttagcaaaaactcagtatggtgtggaaccttggacattacaggacaccagttatgaaatgtggctaacaccacccaaacggtgctttaaaaaacagggaaatactgtggaggtaaaatttgatggctgtgaagacaatgtaatggagtatgtggtatggacacatatatacctgcaggacaacgactcatgggtaaaagtaactagttccgtagatgccaagggcatatattatacatgtggacaatttaaaacatattatgtaaattttaataaagaggcacaaaagtatggtagtaccaatcattgggaagtatgttatggcagcacagttatatgttctcctgcatctgtatctagcactgtacgagaagtatccattgctgaacctactacatacacccccgcacagaccaccgcccctacagtgtccgcctgcaccacggaagacggcgtgtcggcgccgcctaggaagcgagcacgtggaccgtccactaacaacaccctgtgtgtggccaacatcagatccgtggacagtacaatcaacaacatcgtcactgacaattacaacaagcaccaaagaaggaacaactgtcacagtgcagctacgcctatagtgcaactgcaaggtgattccaattgtttaaaatgttttagatatagactgaatgacaaatataaacatttgtttgaattagcatcttcaacgtggcattgggcctcacctgaggcaccacataaaaatgcaattgtaacattaacatatagcagtgaggaacaacgtcagcaatttttaaacagtgtaaaaataccacccaccattaggcataaggtggggtttatgtcattacatttattgtaa

SEQ ID NO: 96 - DNA, 453 bp, Homo sapiens
atggaaagtaaagatgcctccacgtctgcaacatctatagaccagttgtgcaagacgtttaatctttctttgcacactctgcaaattcagtgcgtgttttgcaggaatgcactgaccaccgcagagatatatgcatatgcctataagaacctaaaggttgtgtggcgagacaactttccctttgcagcgtgtgcctgttgcttagaactgcaagggaaaattaaccaatatagacactttaattatgctgcatatgcacctacagtagaagaagaaaccaatgaagatattttaaaagtgttaattcgttgttacctgtgtcacaagccgttgtgtgaaatagaaaaactaaagcacatattgggaaaggcacgcttcataaaactaaataaccagtggaagggtcgttgcttacactgctggacaacatgcatggaagacttgttaccctaa

SEQ ID NO: 97 - DNA, 515 bp, Homo sapiens
cgcggccgcgtcgacgagagaactagtctcgagttttttttcaagtcttttcctttttttttctattttcctggttgagctatttactatttatttagaagagttctttatataatcagaaacctttgtcagctgtatgtgctgccaatgtcttctcccacaacgtgggttgccttttcacattcttactgataacttttgataaaaagatgttcttaccattagtaaaacttattgtctctcctttgagtactgattttgaatatcttttaagaaatctctgccttctcccaaattatgaagatattcttatatgttaccttataaactttattattttactttccatatgtaaatttataaatcatctgaaattgtttttgtcaaaggaatgagaaaacaaaattcttacttaaaaaaatagcccatccacaaagtcttactgattgataatacattcgttcattcttttcccattgcactgcagtattgaatttctgtgtttctctgagaat

SEQ ID NO: 98 - DNA, 297 bp, Homo sapiens
atgcatggaagacttgttaccctaaaggatatagtactagacctgcagcctcctgaccctgtagggttacattgctatgagcaattagaagacagctcagaagatgaggtggacaaggtggacaaacaagacgcacaacctttaacacaacattaccaaatactgacctgttgctgtggatgtgacagcaacgtccgactggttgtggagtgcacagacggagacatcagacaactacaagaccttttgctgggcacactaaatattgtgtgtcccatctgcgcaccaaaaccataa

SEQ ID NO: 99 - DNA, 447 bp, Homo sapiens
aaaaaaagaaaaagaaaattctgccttatatttccattgaataaaactgacattccagaaagctgcattgtgttttatcctgtggattcatcacttctgtgtaccaccagaggtctgcatagtctggtctgaaaactgctgatttaaggccgggcgcagtggctcatgcctgtaatcccagcactttggaaggtcgaggcgggcggatcacctgaggttcaggaattcgagaccagcctggccgacatggcgaggccccaactctactaaaaatatggaaattaggcatggtggtgggcgcctgtaattccagctgctcgggagactgagacaggagaatcgcctgaacccggaaggcggaggttgcagtgagccgagatcgtgccattgcactccagcctgggcaacaagagcaaaagtccatctcaaaaaaaaaaaaaaaaaccc

SEQ ID NO: 100 - DNA, 507 bp, Homo sapiens
aacagcttttcagataagaacaaggagcatagctttttcatcacagactctgatgcttctggaggagatttttggagagaaagatcaggtgaacatacacaagaaaccaactcacctcattcactgaaaaaggatgtagaaaatatggggaaagaagaacttcagaaggttttatttgaacaaatagatttacggagacgactggaacaagaattccaggtgttaaaaggaaacacatctttcccagtattcaataattttcaggatcagatgaaaagggagctagcctaccgagaagaaatggtgcaacagttacaaattatcccctatgcagcaagtttgatcaggaaagaaaagcttggcgcccatctcagcaaaagctaaaaggtgcacagaactacttactcttgttctcttgtaagatacagcctgccatggagcacttctgacccgtgttaaagactgcagatcgaaagggcttgggaattaaatacaaaatcaggttca

SEQ ID NO: 101 - DNA, 183 bp, Homo sapiens
gtactttgtagtttttcatccctactctctttaactggaaatatagaaattagcacattcatgtcaaacactgtccctttctgtcatgttctggatgagcaattaatcttgtttatactgaataaaattttatttgagttgtgaacataaaaaaaaaaaaaaaaaaaaaaaaaaaacccaaaa

SEQ ID NO: 102 - DNA, 448 bp, Homo sapiens
cttagaggtagcagattgtcatatttgaatggaggatttgagtctgagaagtggctgagagttattctgatacaaatagggtgtgcaatttttggtgagtcccattcatcagcttctaaaaaggagtagcagaaacacttgcacagcagcaggagttacttacccttcctgaatggctgcatcttcttaaggctgtttttttccctcctaaacagaaaatcatacattctgcaacaaaagctggaaacatcctaaatgcctggaagcagtttagttttaagggttgaggccaggtgcggtggcttggctgggcacagtggctcacacctgtaatcccagctactcaggaggctgaggcaggagaatcacttggaccagggaggtggaggttgcagtgagccaggattgtgccactgcactccagcctgggcggcagagtgagactctc

SEQ ID NO: 103 - DNA, 276 bp, Homo sapiens
atggctgatcctgcagcagcaacgaagtatcctctcctgaaattattaggcagcacttggccaaccaccccgccgcgacccataccaaagccgtcgccttgggcaccgaagaaacacagacgactatccagcgaccaagatcagagccagacaccggaaacccctgccacaccactaagttgttgcacagagactcagtggacagtgctccaatcctcactgcatttaacagctcacacaaaggacggattaactgtaatagtaacactacaccca

SEQ ID NO: 104 - DNA, 1947 bp, Homo sapiens
atggctgatcctgcaggtaccaatggggaagagggtacgggatgtaatggatggttttatgtagaggctgtagtggaaaaaaaaacaggggatgctatatcagatgacgagaacgaaaatgacagtgatacaggtgaagatttggtagattttatagtaaatgataatgattatttaacacaggcagaaacagagacagcacatgcgttgtttactgcacaggaagcaaaacaacatagagatgcagtacaggttctaaaacgaaagtatttgggtagtccacttagtgatattagtggatgtgtagacaataatattagtcctagattaaaagctatatgtatagaaaaacaaagtagagctgcaaaaaggagattatttgaaagcgaagacagcgggtatggcaatactgaagtggaaactcagcagatgttacaggtagaagggcgccatgagactgaaacaccatgtagtcagtatagtggtggaagtgggggtggttgcagtcagtacagtagtggaagtgggggagagggtgttagtgaaagacacactatatgccaaacaccacttacaaatattttaaatgtactaaaaactagtaatgcaaaggcagcaatgttagcaaaatttaaagagttatacggggtgagtttttcagaattagtaagaccatttaaaagtaataaatcaacgtgttgcgattggtgtattgctgcatttggacttacacccagtatagctgacagtataaaaacactattacaacaatattgtttatatttacacattcaaagtttagcatgttcatggggaatggttgtgttactattagtaagatataaatgtggaaaaaatagagaaacaattgaaaaattgctgtctaaactattatgtgtgtctccaatgtgtatgatgatagagcctccaaaattgcgtagtacagcagcagcattatattggtataaaacaggtatatcaaatattagtgaagtgtatggagacacgccagaatggatacaaagacaaacagtattacaacatagttttaatgattgtacatttgaattatcacagatggtacaatgggcctacgataatgacatagtagacgatagtgaaattgcatataaatatgcacaattggcagacactaatagtaatgcaagtgcctttctaaaaagtaattcacaggcaaaaattgtaaaggattgtgcaacaatgtgtagacattataaacgagcagaaaaaaaacaaatgagtatgagtcaatggataaaatatagatgtgatagggtagatgatggaggtgattggaagcaaattgttatgtttttaaggtatcaaggtgtagagtttatgtcatttttaactgcattaaaaagatttttgcaaggcatacctaaaaaaaattgcatattactatatggtgcagctaacacaggtaaatcattatttggtatgagtttaatgaaatttctgcaagggtctgtaatatgttttgtaaattctaaaagccatttttggttacaaccattagcagatgccaaaataggtatgttagatgatgctacagtgccctgttggaactacatagatgacaatttaagaaatgcattggatggaaatttagtttctatggatgtaaagcatagaccattggtacaactaaaatgccctccattattaattacatctaacattaatgctggtacagattctaggtggccttatttacataatagattggtggtgtttacatttcctaatgagtttccatttgacgaaaacggaaatccagtgtatgagcttaatgataagaactggaaatcctttttctcaaggacgtggtccagattaagtttgcacgaggacgaggacaaggaaaacgatggagactctttgccaacgtttaaatgtgtgtcaggacaaaatactaacacatta

SEQ ID NO: 105 - DNA, 473 bp, Homo sapiens
cgcggccgcgtcgacccggttcccgggaggatgaagttcgtgtacaaagaagagcatccgttcgagaagcgccgctctgagggcgagaagatccgaaagaaatacccggaccgggtgccggtgatagtagaaaaggctcccaaagctcggataggagacctggacaaaaagaaatacctggtgccttctgatctcacagttggtcagttctacttcttgatccggaagcgaattcatctccgagctgaggatgccttgtttttctttgtcaacaatgtcattccacccaccagtgccacaatgggtcagctgtaccaggaacaccatgaagaagacttctttctctacattgcctacagtgacgaaagtgtctacggtctgtgaagctgctgcccctgagctggaggggggtctcattctacaaagagagaggtggccccctttctgacctctcctccttcagctcaacacac

SEQ ID NO: 106 - DNA, 1098 bp, Homo sapiens
atggagactctttgccaacgtttaaatgtgtgtcaggacaaaatactaacacattatgaaaatgatagtacagacctacgtgaccatatagactattggaaacacatgcgcctagaatgtgctatttattacaaggccagagaaatgggatttaaacatattaaccaccaagtggtgccaacactggctgtatcaaagaataaagcattacaagcaattgaactgcaactaacgttagaaacaatatataactcacaatatagtaatgaaaagtggacattacaagacgttagccttgaagtgtatttaactgcaccaacaggatgtataaaaaaacatggatatacagtggaagtgcagtttgatggagacatatgcaatacaatgcattatacaaactggacacatatatatatttgtgaagaagcatcagtaactgtggtagagggtcaagttgactattatggtttatattatgttcatgaaggaatacgaacatattttgtgcagtttaaagatgatgcagaaaaatatagtaaaaataaagtatgggaagttcatgcgggtggtcaggtaatattatgtcctacatctgtgtttagcagcaacgaagtatcctctcctgaaattattaggcagcacttggccaaccaccccgccgcgacccataccaaagccgtcgccttgggcaccgaagaaacacagacgactatccagcgaccaagatcagagccagacaccggaaacccctgccacaccactaagttgttgcacagagactcagtggacagtgctccaatcctcactgcatttaacagctcacacaaaggacggattaactgtaatagtaacactacacccatagtacatttaaaaggtgatgctaatactttaaaatgtttaagatatagatttaaaaagcattgtacattgtatactgcagtgtcgtctacatggcattggacaggacataatgtaaaacataaaagtgcaattgttacacttacatatgatagtgaatggcaacgtgaccaatttttgtctcaagttaaaataccaaaaactattacagtgtctactggatttatgtctatatga

SEQ ID NO: 107 - DNA, 490 bp, Homo sapiens
  misc_feature (340)..(340): Wherein n may be a, c, g or t
gaggagcaatgccctgatgccctcctccttcgctctctatgggctggcttcagctaccatctgtacagctgcagctccaaaatctcttccacagtccacacctcccactcagctccagatcccatcactgctgccagctggtcatccccccgaaggaggctcagagtctacctcccaggcccttggccactgagctcttggagagtcctctctccctgtgccctttgcagctccaccaacccaaccaccagctccctcctccaagcctcacattctccacctccaggctttgatcaggcacagaacgcccttccatggaatgcccctccatgcctgtgtntccaacctactgaatctggtggactgactgcccgaatctgagacttaggtcagaaggcacctctgtgaagcctgccatgacacattataacatgcgtcacattatagtttaccatttacacattcaaaaaaaaaaaaaaaaaaaaaaacc

SEQ ID NO: 108 - DNA, 477 bp, Homo sapiens
atgcaccaaaagagaactgcaatgtttcaggacccacaggagcgacccagaaagttaccacagttatgcacagagctgcaaacaactatacatgatataatattagaatgtgtgtactgcaagcaacagttactgcgacgtgaggtatatgactttgcttttcgggatttatgcatagtatatagagatgggaatccatatgctgtatgtgataaatgtttaaagttttattctaaaattagtgagtatagacattattgttatagtttgtatggaacaacattagaacagcaatacaacaaaccgttgtgtgatttgttaattaggtgtattaactgtcaaaagccactgtgtcctgaagaaaagcaaagacatctggacaaaaagcaaagattccataatataaggggtcggtggaccggtcgatgtatgtcttgttgcagatcatcaagaacacgtagagaaacccagctgtaa

SEQ ID NO: 109 - DNA, 297 bp, Homo sapiens
atgcatggagatacacctacattgcatgaatatatgttagatttgcaaccagagacaactgatctctactgttatgagcaattaaatgacagctcagaggaggaggatgaaatagatggtccagctggacaagcagaaccggacagagcccattacaatattgtaaccttttgttgcaagtgtgactctacgcttcggttgtgcgtacaaagcacacacgtagacattcgtactttggaagacctgttaatgggcacactaggaattgtgtgccccatctgttctcagaaaccataa

SEQ ID NO: 110 - DNA, 486 bp, Homo sapiens
gtcgacgcggccgcgggagctgatgggcagcctgcgccaccctggatcaccgtcactcggcagaagcggagggggaccttggaccagccacccaaccaggaagacaagcctggggcactgaccctgaagtctgaaccaggaaagcaagccaaggtgcccgagagaggccaggagcctgtgaagcaagctgactttgttcgcagcaagtctttcctgataacccctgtgaagcccgctgtggaccggaagcagggggcaaagctcaacttcaaggaggggctgcaaagaggaatctcattgtcccatcagaacttggctcagtctgcagtgatgatggagaaggaactgcatcagctgaagagagccagttatgccagtacagatcagccatcctggatggaacttgccagaaagaaatctcaagcttggagtgacatgccccagattataaaataggtgggcagtgtgctgataaagcatgtccac

SEQ ID NO: 111 - DNA, 506 bp, Homo sapiens
ttccccgcctctcggctagctccggcctcccggggcttctgggtttggagagtttggggagcggagacacctcccgaggctcctccgcgttggaccctatttgcgagggcgggagcggggtgggccgacggcgaagctccagaggtgggaccctctcccttcagcagctcttcctgacttcatgattctgcccctcttctcattgcaggtcacaccgacaaatctgaagcgggtttgccaggggagtgtacccgtctccccagcctgggccacccggtccacagggattccatttccggccttacactccgctccacgatctcatccaggcgctgcagctgtgcagctgctctacagactgcagggacctgctgagacgaatccccggacgaggtgatggctggaccggcggaggaggcgggagcccattgtcccgagagcctgtggcctctgcctccgcaggtgtcaccaagagtgacctacacacgagtgagcccagggcaggc

SEQ ID NO: 112 - DNA, 1947 bp, Homo sapiens
atggcggacgattcaggtacagaaaatgaggggtcggggtgtacaggatggtttatggtagaagccatagtagagcacactacaggtacacaaatatcagaagatgaggaagaggaggtggaggacagtgggtatgacatggtggactttattgatgacaggcatattacacaaaattctgtggaagcacaggcattgtttaataggcaggaggcggatgctcattatgcgactgtgcaggacctaaaacgaaagtatttaggcagtccatatgtaagtcctataagcaatgtagctaatgcagtagaaagtgagataagtccacggttagacgccattaaacttacaacacagccaaaaaaggtaaagcgacggctgtttgaaacacgggaattaacggacagtggatatggctattctgaagtggaagctgcaacgcaggtagagaaacatggcgacccggaaaatgggggagatggtcaggaaagggacacagggagggacatagagggtgagggggtggaacatagagaggcggaagcagtagacgacagcacccgagagcatgcagacacatcaggaatattagaattactaaaatgtaaggatatacgatctacattacatggtaagtttaaagactgctttgggctgtcatttgttgatttaattaggccatttaaaagtgatagaaccacatgtgccgattgggtggttgcaggatttggtatacatcatagcatagcagatgcatttcaaaagttaattgagccattaagtttatatgcacatatacaatggcttacaaatgcatggggaatggtactattagtattaataaggtttaaagtaaataagagcagatgtaccgtggcacgtacattaggtacgttattaaatatacctgaaaatcacatgttaattgagcctcctaaaatacaaagtggcgtacgagccctgtattggtttaggacaggcatttcaaatgcaagtacagttataggggaggcgccggaatggataacgcgccagaccgttattgaacatagtttggctgacagtcaatttaaattaactgaaatggtgcagtgggcatatgataatgatatttgtgaagaaagtgagatagcatttgaatatgcacagcgtggagactttgactccaatgcaagggcctttttaaatagtaatatgcaggctaaatatgtaaaagattgtgcaattatgtgcagacattataaacatgcagaaatgaaaaagatgtctattaaacaatggattaagtataggggtactaaagttgacagtgtaggtaactggaagccaattgtgcagtttctaagacatcaaaacatagaatttattccatttttaagcaaactaaaattatggctgcacggaacgcccaaaaaaaattgtatagccattgtagggccacctgacactgggaagtcgtgcttttgcatgagtttaattaagtttttggggggaacagttattagttatgttaattcctgcagccatttctggctacagccactaacggatgcaaaagtggcattattggatgatgccacacaaccatgttggacatatatggatacatatatgagaaacctattagatggtaatcctatgagcatagatagaaaacatagagcattaacattaattaagtgtccaccgctactggttacatcaaatatagacattagcaaagaggagaaatacaaatatttacatagtagagttaccacatttacatttccaaatccattcccctttgacagaaatgggaatgcagtatatgaactatcagatgcaaactggaaatgtttctttgaaagactgtcgtccagcctagacattgaggattcagaggacgaggaagatggaagcaatagccaagcgtttagatgcgtgccaggatcagttgttagaacttta

SEQ ID NO: 113 - DNA, 1422 bp, Homo sapiens
atgcgacacaaacgttctgcaaaacgcacaaaacgtgcatcggctacccaactttataaaacatgcaaacaggcaggtacatgtccacctgacattatacctaaggttgaaggcaaaactattgctgtacaaatattacaatatggaagtatgggtgtattttttggtgggttaggaattggaacagggtcgggtacaggcggacgcactgggtatattccattgggaacaaggcctcccacagctacagatacacttgctcctgtaagaccccctttaacagtagatcctgtgggcccttctgatccttctatagtttctttagtggaagaaactagttttattgatgctggtgcaccaacatctgtaccttccattcccccagatgtatcaggatttagtattactacttcaactgataccacacctgctatattagatattaataatactgttactactgttactacacataataatcccactttcactgacccatctgtattgcagcctccaacacctgcagaaactggagggcattttacactttcatcatccactattagtacacataattatgaagaaattcctatggatacatttattgttagcacaaaccctaacacagtaactagtagcacacccataccagggtctcgcccagtggcacgcctaggattatatagtcgcacaacacaacaggttaaagttgtagaccctgcttttgtaaccactcccactaaacttattacatatgataatcctgcatatgaaggtatagatgtggataatacattatatttttctagtaatgataatagtattaatatagctccagatcctgactttttggatatagttgctttacataggccagcattaacctctaggcgtactggcattaggtacagtagaattggtaataaacaaacactacgtactcgtagtggaaaatctataggtgctaaggtacattattattatgatttaagtactattgatcctgcagaagaaatagaattacaaactataacaccttctacatatactaccacttcacatgcagcctcacctacttctattaataatggattatatgatatttatgcagatgactttattacagatacttctacaaccccggtaccatctgtaccctctacatctttatcaggttatattcctgcaaatacaacaattccttttggtggtgcatacaatattcctttagtatcaggtcctgatatacccattaatataactgaccaagctccttcattaattcctatagttccagggtctccacaatatacaattattgctgatgcaggtgacttttatttacatcctagttattacatgttacgaaaacgacgtaaacgtttaccatattttttttcagatgtctctttggctgcctag

SEQ ID NO: 114 - DNA, 375 bp, Homo sapiens
atggcagataataaagctccccaagggctgctggggctcctgcagtacactccgactacccaaccctatccgagagtgacaccgcccagcaatcgacgtccatcgactacaccgaactcccaggacagggggagacctcgcaggtccgacaaagacagcagaaaacacctgtacgcagacggccttacggacggcgaagatccagaagtcccagaggtggaggacgaagagaaggagaatcaacgccctctaggacacccggatctgtcccttctgcgcgagacgttggaagtatacacacaacgcctcaaaagggacattcttcaagacttagacgacttctgcaggaagcttgggatccacccgtggtctgtg

SEQ ID NO: 115 - DNA, 1596 bp, Homo sapiens
atgcaggtgacttttatttacatcctagttattacatgttacgaaaacgacgtaaacgtttaccatattttttttcagatgtctctttggctgcctagtgaggccactgtctacttgcctcctgtcccagtatctaaggttgtaagcacggatgaatatgttgcacgcacaaacatatattatcatgcaggaacatccagactacttgcagttggacatccctattttcctattaaaaaacctaacaataacaaaatattagttcctaaagtatcaggattacaatacagggtatttagaatacatttacctgaccccaataagtttggttttcctgacacctcattttataatccagatacacagcggctggtttgggcctgtgtaggtgttgaggtaggtcgtggtcagccattaggtgtgggcattagtggccatcctttattaaataaattggatgacacagaaaatgctagtgcttatgcagcaaatgcaggtgtggataatagagaatgtatatctatggattacaaacaaacacaattgtgtttaattggttgcaaaccacctataggggaacactggggcaaaggatccccatgtaccaatgttgcagtaaatccaggtgattgtccaccattagagttaataaacacagttattcaggatggtgatatggttcatactggctttggtgctatggactttactacattacaggctaacaaaagtgaagttccactggatatttgtacatctatttgcaaatatccagattatattaaaatggtgtcagaaccatatggcgacagcttatttttttatttacgaagggaacaaatgtttgttagacatttatttaatagggctggtactgttggtgaaaatgtaccagacgatttatacattaaaggctctgggtctactgcaaatttagccagttcaaattattttcctacacctagtggttctatggttacctctgatgcccaaatattcaataaaccttattggttacaacgagcacagggccacaataatggcatttgttggggtaaccaactatttgttactgttgttgatactacacgcagtacaaatatgtcattatgtgctgccatatctacttcagaaactacatataaaaatactaactttaaggagtacctacgacatggggaggaatatgatttacagtttatttttcaactgtgcaaaataaccttaactgcagacgttatgacatacatacattctatgaattccactattttggaggactggaattttggtctacaacctcccccaggaggcacactagaagatacttataggtttgtaacccaggcaattgcttgtcaaaaacatacacctccagcacctaaagaagatgatccccttaaaaaatacactttttgggaagtaaatttaaaggaaaagttttctgcagacctagatcagtttcctttaggacgcaaatttttactacaagcaggattgaaggccaaaccaaaatttacattaggaaaacgaaaagctacacccaccacctcatctacctctacaactgctaaacgcaaaaaacgtaagctgtaa

SEQ ID NO: 116 - DNA, 313 bp, Homo sapiens
gagacaccagcactagccagcaggtgccccttcctcaggcttctgagtttcagccccatgcgatcactcctccaagcttctaggttttaataattccaacttttccccctttgtccctcagaggtggtagctgcttccagaaattgctaccttcatgataccacagagttctcttttttgctttttgagttcttcgataactagttaatgattccttatacttagctaaccattctctatattaaattctctctgttaaaacaaaaaaaaaaaaaaaaaaaaaaaaaaaaaaaaaaaaaaaaaaccaaaaaaa

SEQ ID NO: 117 - DNA, 439 bp, Homo sapiens
ctgaaatgcacatacatgctttagtgtaatgcagaatgcatttattggagaactcataaacatcctataaaattttcttccctgagatgcaactataaaacttggccttattctgagaatgcttaacatagatttcatccatactgtaacactgattttgttgttgttgtccttaaagcagctcagcttcctgaggtagtgttatgtctctgtggcaacaaggtgaaaatgtctagcttattttgtcaaagtcaacaataatccacagactccagacctcaatatctgtcccaatttgccattttactttagtgctccaaaaatatggcttatagaaaaaacaataggtgttttaaagagatttacctgaatgatatagagaatgtctagatattttctggctatcaggtaaaacctacccttcaagatggtagaatat

SEQ ID NO: 118 - DNA, 553 bp, Homo sapiens
  misc_feature (510)..(510): Wherein n may be a, c, g or t
ctttcagcagcagcggtagagcagtgaccaggcgtctccgcgatgggccccggggacttccgccgctgcagagagagaatttcccaggggctccagggactcccaggtagagcggagctttggttcccacctcgtcccgcgtgcgacttcttcggggacggcaggagcacggacatccaggaggaggccctcgccgccagcccgctgctggaggacctcagacgacggctgacgcgcgccttccagtgggcggtgcagcgcgcgatctcgaggcgcgtgcaggaggcggcggcggcggcggcggcgcgggaggagcagagctggacgggcgttgaggccaccctggccaggctgcgggcggagctggtggaaatgcatttccaaaaccaccagctggctagaactttactggacctaaacatgaaagtgcagcaattgaaaaaggagtatgaactggaaattacatcagactcccaaagcccaaaagatgatgctgcgaatccggaatanagaaatgcacacgcaagggctgggcgcggtggctcacgcctgg

SEQ ID NO: 119 - DNA, 54 bp, Homo sapiens
ggatcagacattcgcgggacgagatcgacccaacgagggagcgcaacctgcctc

SEQ ID NO: 120 - DNA, 410 bp, Homo sapiens
tggcgtgcggctttcgccgcgctattgcttgccaggtatggatcccggagcgcgcagaggagtccctgaggagctagggaccccaaaggcctttcaccgctgcgggccagtcctcagtcagctggagggtgggtcccacggaatcctgttagtttctaccacctcctcccccttctctggagctggtggagcttcagaagtcctgtggagcgtcggctgggatcagtttgtctcggtgaaaagtaaactttgaaagctttccagagtgttgaatcttccaccagaaaacttgatcacatcaatatctgcagttccaatttcccaaaaagaagaagtagctgattttcagctttctgtggattctttattggaaaaagacaatgaccattcagaccagatatcaagtcaag

SEQ ID NO: 121 - DNA, 1206 bp, Homo sapiens
atggaaaacctcagcagtcgcttagacttactgcaagagcagctaatgaacctatatgaacaggacagtaaattgatagaagatcaaattaagcagtggaatctaattagacaagaacaagttcttttccatttcgccagaaaaaatggggtaatgagaattggattgcaggcagttccatctttagcgtcctcacaggagaaggcaaagacagctattgaaatggtgttacatttagagtctttaaaggactcaccttatggcacagaggattggtcacttcaagacactagcagagagctgtttttggcacccccagctggcaccttcaagaagagtggcagcacacttgaggttacctatgacaataaccctgataatcagacaaggcacacaatttggaatcatgtgtattatcaaaatggggacgatgtatggagaaaagtatccagtggtgttgatgctgtaggagtgtactatttagaacacgatggctataaaaattattatgtgttatttgctgaggaggcctctaagtacagcacaacaggacaatatgctgtaaattacaggggtaaaaggtttacaaatgttatgtcttccactagctccccaagggctgctggggctcctgcagtacactccgactacccaaccctatccgagagtgacaccgcccagcaatcgacgtccatcgactacaccgaactcccaggacagggggagacctcgcaggtccgacaaagacagcagaaaacacctgtacgcagacggccttacggacggcgaagatccagaagtcccagaggtggaggacgaagagaaggagaatcaacgccctctaggacacccggatctgtcccttctgcgcgagacgttggaagtatacacacaacgcctcaaaagggacattcttcaagacttagacgacttctgcaggaagcttgggatccacccgtggtctgtgtaaaagggggtgccaatcagcttaagtgtctcaggtacagacttaaagcatctactcaagttgactttgacagcataagcaccacatggcattggacagatagaaaaaacaccgagaggataggtagtgctagaatgttagtaaagtttattgatgaggctcaacgagagaagtttcttgagagagttgctttgcccagatcagtgtctgtgtttttgggacagtttaatgggtcttaa

SEQ ID NO: 122 - DNA, 423 bp, Homo sapiens
atggcgacaccaatccggaccgtcagacagctttccgaaagcctctgtatcccatatattgatgttttattgccttgtaatttttgtaattattttttgtctaatgctgagaagctgctttttgatcattttgatttgcatcttgtctggagagacaatttggtgtttggatgctgtcaagggtgtgctagaactgttagcctattggagtttgttttatattatcaggagtcttatgaggtaccggaaatagaagaaattttggacagacctttattgcaaattgaactccgttgtgttacatgcataaaaaaactgagtgttgctgaaaaattggaggttgtgtcaaacggagaaagagtgcatagagttagaaacagacttaaagcaaagtgtagtttgtgtcgcttgtatgctatataa

SEQ ID NO: 123 - DNA, 282 bp, Homo sapiens
atggtgggcgaaatgccagcactaaaggacctggttcttcaacttgaaccaagcgtcctagatttagatctttattgttacgaggaggtgcctcctgatgacatagaggaggagttagtgtcgcctcagcaaccttatgctgtcgttgcttcctgtgcctattgcgagaaactggttcgattgaccgtcctcgcggatcacagcgccattagacagctggaggaactccttctgcgatctttgaacatcgtgtgcccactgtgcaccctacagcgacagtaa

SEQ ID NO: 124 - DNA, 408 bp, Homo sapiens
gtctctacaaataataaaaaattgtctgggcatggtggcctgtgcccgtagtcccagctactcaggagggtgaggtgggaggatcgcttgggcctaggaggtcaagcctgcagtgagttgtaatcacgccactgcactccagcctgggcaacacagcgagatcctatttctcctatttctctctgtctctctcacacacacacacacacacaaacacacacataatgtggaatgattaaacaaagctaattaacatatcggtcacctcctttaatttttccagcaagacatgtgaaatttattcttttagcctattttgaaatacatgtcatatatcattattaactatagtcaccctggtgtgcgatggatctcaaaaacttattttttctgtctaactcaaacttt

SEQ ID NO: 125 - DNA, 617 bp, Homo sapiens
  misc_feature (306)..(306): Wherein n may be a, c, g or t
  misc_feature (399)..(399): Wherein n may be a, c, g or t
ggccgactcccaggatccgttgcggcgcggcggagcagccaatggcgagccccacagtctcgcgagagtgctcaggcgctcttcgtggctgccctcttagctgctagcggagctcctcagggggcggccgggagcctacaattcctagaaagaaaatacgccattccggaaacagaactgcagttaagaccctcgaaaagatctaagatagtgtgcatcctataacacctgacgaatttcagaatgtgacaaagcgcagaggatgcattatttcaaaacaaaacagaaggctaaaatttgcagganaaagaaaatcagtaaaccgggaatcctcggactggattgtaagcaagatttgaatgaattagaagctgaaggtatttaggctgtgatataganggtacatatttcatcccacagagaaaacataatactcgaaatttcgtgaaaaacgcaaactgtcggaaatctcctcagtccgactaatgcgcgcttgacatgcgatgtgaatgccctctgtcggcgctgtcgctgacgcacatctgtccgtggtcgtctatcgatatgtgttgtgttatgctgtgtctatcgcgtcgctgtcactgtccggttgcctt

SEQ ID NO: 126 - DNA, 4992 bp, Homo sapiens
ggctatcctactgcagctggctgcatcagatgtgccaggcctgccctctagctcccaacaccatctgcctgatctaagctttgccatgttgttgtcactgctgggtgcctgtgctgtggtggggccattccatggccctgagtgggagccagtgcagggcctgctctcccagaatcacagctgcagggaccctcagtgctgtggcaacctgcttgtcctctgcctctttctggtctggcaggtccggcactgttggcaccaggtcaccaggacccgcttcagcacaaggaatgtcatcaaggtgccactgcagaagcgggcagtgccctccatgaggtgcgaaactgtcttcaagctgactcctgaattcttcagtcctggaaagtccaggggcctagattctcaacaatgcgcacaaaggcagagatggggataccggaggagcctccaggaatcatgggcccagaacctgctctctccacagcacccatgtccaggcccaccttcgggtgtccacacccactctgagcccatcttttgtaccacctccatttcaaacacctgtttactgcctcagaacagttcctggaaagcatggcaggtgccttggtgtctccatgatggtcagactcgccctgccttggacatgtgtcaagagatggagcagctgctgcttcactcacaggaaaggttggtgtcactggagcctgtcatcagtgtgaggtctcgccccacctccatgaccttaaccacctctcttccaaacttactttcagctgagaggctgcagttctgcccccagagagctcctgcctgatccttcccaccaaacactgagaatgtgcacttggaagtcttggcactgtcgaccagaggcctgggaaccagggggtaaaaaccagaaagcaggcagagaggatagtagagagacccaggctccaaggtgggtgaaccagacagggagcagacgggaggatgcttcagaaatccaggcatctggggagtagttcccagtagactttggaatggagggtgatgcagagactaacgtgttggagtgtgcaaaccagagactagtaataagtgaaactgatggcgagatcttgacaccagggtgggacacccaggaccggatgggagttgagagtagaaccaacattcaggaactagggaatagaaaccagagggaggctggaggtgagaatctccctgaaacccaggcacatatgggagagaaccaagaacagttaagatgtaaaattgatgcagagacccaaacacctgagtgggagaaccaggataagaatggaagtgaggatgctgtggagacccagacatttgagaagaaggacaagaaagaggctggagaggaggatggggaagagatccaggctcaaggattggggaagcaaggccagactggagatgagaatggtgaggagacccagacaccacagtgggagaaacaagatcagatgaaaggtgatgcggatgtggaaattcagatggaagaggggagaaacaaggatcaggttggaggtcaggatgctgcacaaacccaatcatgtgggagggagaacgtgggagaagtaaaaaaagagaatagtgtagagacccaggccttggattggggaaaacaggaatgtgttggaaatgggaatgttacagagatccagacaccaaggtgggagaagcatgatcaaggtggaagtaagaaagctaagaagacccaagcatctgggggagagaaccagaaacaattaagtcatgaaattcaagtggggtggggaaataagggcctgagaagagatgaagatgctaaggaaacccagatagctaccaagaagaagctcagggagataagagaaggattgggtggtgatccaggcactatggtggggaaaccggagacaagtagcaagtgaaatttatagagaatttgagatactatgttgggagaatcagaactggattggaggtgaacatagagcagaaattcaggcatcagagaagagagaccaaagaaaggatggatgtgaggatggcacaaatatcctggcacccgaggctgagatccaggaacaattaaaaggtgaaactgatgtggagactcagagcaatgagccacttagagaagaggatggtacagacattcagtcactagggaggagagaggttaaaggtgaggatgataaagacacccaggaacttgggaggaaaaatcagggtcagttaggaaatgaatttagtggaaagattcacataccaaaggggaagaatcaggaacatattagaggcgaagatggtgcacatacccagatatctgagtcagggaactggggcaaattaacaagtcaaattgatggagaaatgcattcagcagaatggaagaaagatcagcagattggaggtgagaatggggcagaaattcagatacaagggaagagaaacctgagagaagttggaggtgaggacggtgtaaagacctgggcacctgggaaagaaacccagagtcagtttagaagtgatcttggtagaaagatccttttatcagagtggaagagccagaagcagatgggaagtgagaatggaacagaaattcaggctccagtggagagaaaccagagagaacctggaggtgaggacggtgtaaagactcagagacctaagagagagaacgaggaccagttagatagtgaaattggagggagccattcaccagggaggaggaactgggagctgattggaaaggatgttgcagaaaatcaggcatcagagaagagaaaccagagagaggttggaaacgaggacggtagaatgatctggaggcttaggggaaaaaactggaggcttagagcgaagaaacagactgttaaaaagtaaagataatggaaagacccgtttatcagagtggaagaaccaggaacagggtggaggtgggaatgatgaagaaattcaaatacaggggaagagaaacctgagagggaccacagctgatgatggtacagagacccaggctcctgcaggagatgaccagggacagttaagagttgaaattgctgaagagatccaggtacaagggcaaggaaataagaatgacggtggagttgaggatgttgcagaactccaggatataggaagccagagaaagtgcacagatgaggatgttggagagcctcgagcaccaaggggaggaaacaaggatctggtcagaggagaggatgctgtgagggacagtctccaagtcgactgttctgggagtgagaggcccacaggcaggaagcacagcctaccatggcctccagccttcactggctatggatgtgggacccgggaacaggaacaggcagtggctgtgaatggtttcatctctgccccctgtcctgagatgaatcctgtcccccactggggtgaagtcttcctgctggtgggtggggagggagagcatctggccagccagggcacaacccctgccagggatcatagagtggggatcagtccagcctcccagcaggcccaacctgaatcctggagaagacgacaaagggacaaaggggtggatccagagaaggcccccagcctgactcggcagtcccaaaaccctccgtctctgacagctcccttgggcatgccctctgcctgctcctgtctcccgtgtggcccagccccggaagctgccatcattctagcgggtcctcccaccgccctcactgtcctgcccaaggggacaggcctcaagaagagcaaacgactgctcctggagtccctcatgcggaggaggattgcacacctgaagtggggtcttccccggcggatcctggagtcctatttcctgtttaacttcttaggatcttgctcattgacccttgctggggcgaggctctctggactgaacacaggccaggagctccaagcccagcaggaaaggtattgtgaggcccaaggctccccaccaggccttaagtccccagagaggttccagagggttcagcgcccagacagaaaaagctcgaaacttcctatacaagccagagctctggagaggaacagaccgcacatgtcagagcccattaagcatttccatccagcctgaaaaggccaggagagtcaggccaccagggggcgccagagaaccacaggagatccaggaagcgcttgctaggaccaagctcccagctcccaggacccccaggccggcagcggagtccaggagctggtgtggcccacaaagggtcggagagcctcccagtgagaacagtaggggcaggaaaatgatcaggtcaagggtctcccagctggcagagagggctcccagcagagtgaggacttcattctctagggcagaccacgcccactggaggaaggaatgtacatcctgggaggcctctaagctccccagactcaaatgccagcagctcacatactggagaagaggaagcctggaatctacagggtgcagaggggctgggcagcagccttcctgccattctgcagaacctgtcagcttcaaagggaggctccactctgcggtggcaaagctgggcctgacccttctggccaagatgtcctggtccccacagctcgccaagcgcaagcacttggcccctaacctgagcctgagggaacctgattctactctgcctcccaaagtgggtgatcctcgtgcaggggaggacagcatcggagatcacactgcttcacagagggatcttcagctgcaaggtcactgctgtactggggccacccttcctaagacagagagtccccagggccaggaggcacctgggaacccaaatggggctccacagaatacacgagcctccaaaaagtttagtattatgaagcatctgaattttttttctcttccagaatggctttaaaaagtagactcaggcccagagtcctcaggacatatcagaaaagctttgagagtgtcctgatccctgcaaagcctctaataaattggtcatttgggcaaaaaaaaaaaaaaaa

SEQ ID NO: 127 - DNA, 1527 bp, Homo sapiens
atgtataatgtttttcagatggctgtctggttaccagcgcagaataagttctatcttcctccccagcccatcactagaatcctgtccactgatgaatatgtaaccagaaccaatctcttctaccatgcaacatctgaacgtctactgctggtcggacatcctttgtttgagatctccagtaatcaaactgtaactataccaaaagtgtcaccaaatgcatttagagtttttagggtgcgttttgctgatccaaatagatttgcatttggggataaggcaatttttaatccagaaacagaaagattagtttggggcctaagagggatagagataggtagaggccagcctttaggtataggaataacgggccaccctcttttaaataagttagatgatgcagaaaatccaacaaattatattaatactcatgcaaatggagattctagacaaaatactgcttttgatgcaaaacagacacaaatgttcctcgtcggctgtactcctgcttcaggtgaacactggacaagtagtcgttgcccaggggaacaagtgaaacttggggactgccccagggtgcaaatgatagagtctgtcatagaagatggtgacatgatggatattggttttggggctatggattttgctgctttacagcaagacaagtctgatgtccctttagatgttgttcaagcaacatgcaaatatcctgattatatcagaatgaaccatgaagcctatggcaactctatgtttttttttgcacgtcgcgagcaaatgtataccaggcacttttttactcgcgggggttcggtgggtgataaggaggcagtcccacaaagcctgtatttaacagcagatgctgaaccaagaacaactttagcaacaacaaattatgtaggcacaccaagtggctctatggtttcatctgatgtccaattgtttaatagatcttactggcttcagcgatgtcaaggccagaataatggcatttgctggagaaaccagttatttattacagttggagataataccagaggaacaagtttatctatcagtatgaaaaacaatgcaagtactacatattccaatgctaattttaatgattttctaagacatactgaagaatttgatctttcttttatagttcagctttgtaaagtaaagttaactcccgaaaatctagcctacattcatacaatggaccctaatattttagaggattggcaactatctgtatctcaaccacctaccaatcctctagaagatcaatataggtttttagggtcttccttggcagcaaaatgtccagaacaggcgcctcctgagccccagactgatccttatagtcaatataaattctgggaagtcgatctcacagaaaggatgtccgaacaattagaccaatttccactaggaaggaaatttctatatcaaagtggcatgacacaacgtactgctactagttccaccacaaagcgcaaaacagtgcgtgtatctacgtcagccaagcgcaggcgtaaggcttag

SEQ ID NO: 128 - DNA, 1524 bp, Homo sapiens
atgtatcgcctacgtagaaaacgcgctgcccccaaagatatatacccctcatgcaaaatatcaaacacctgcccacctgacattcaaaataaaattgagcatacaacaattgctgataaaatattgcaatatggcagtctgggagtttttttgggaggtttgggcattggaacagccagaggctctggaggaagaattggttatactcccctcggtgagggtggtggggttagagttgctactcgtccaactccagtaaggcctacaatacctgtggaaacagtaggccccagtgaaattttccccatagatgttgtagatcctacaggccctgctgttattcccctacaagatttaggtagagacttcccaataccaactgtgcaggttattgcagaaattcaccctatttctgacataccaaacattgttgcatcttcaacaaatgaaggagaatctgccatattagatgtgttacgagggaatgcaaccatacgcactgtttcaagaacacaatacaataacccctctttcactgttgcatctacatctaatataagtgctggagaagcatcaacatcagatattgtatttgttagcaatggttcaggtgacagggtggtgggcgaggatatccccttggtagaattaaacttaggccttgaaacagacacatcttctgttgtacaagaaacagcattttccagcagcacaccaattgctgaaagaccctcttttaggccctcaagattctataataggcgtctatatgaacaggtgcaagtacaagaccctaggttcgttgagcagccacagtcaatggtcacttttgataatccagcatttgagccagagcttgatgaggtgtctattatcttccaaagagacttagatgctcttgctcagacaccagtgcctgaatttagagatgtagtttatctgagcaagcccacattttcgcgggaaccagggggacggttaagggttagccgccttggcaaaagttcaactattcgtacacgcctgggcacagcaattggcgccagaacccactttttctatgatttaagttctattgctccagaagactcaattgaattattgcctttaggtgagcatagtcaaacaacagtcattagttccaacttaggtgacacagcatttatacaaggtgagacagcagaggatgacttagaagttatctctttagaaacaccacaattatattcagaagaagagcttttagacacaaacgaaagtgtgggcgaaaatttgcaacttactattactaactcagagggtgaggtttctatactagatttaacacaaagcagagtcaggccaccttttggcactgaagatactagcttgcatgtatattacccaaattcttctaaagggactccaataattaatcctgaagaatcatttacacctttggttattatagctcttaacaactcaacaggggattttgagttacatcctagtcttagaaagcgtcgtaaaagagcttatgtataa

SEQ ID NO: 129 - DNA, 535 bp, Homo sapiens
gagcagcacattccacccatgctgagagccactggttgctcccagcttggtctgtatcctcctgagcagctcccaccccctgaaatgctttggagaagaaagaagaggaggccatgtttggaaggaatgcagcagcagggccttgggggagtccccgcccgggtgagggctgtcacttaccacctggaggacctaagaaggcgtcagagcatcatcaacgaactgaagaaggcccagtggggcagctctggggctgcatctgagccagtggtgcttggcgaagagggctgtggattccccagcaccaatgaataccctgatctggaagaggagagagcaacctatccacaggaagaggaccgttttctcactcctggcagggcccagctgctttggtctccctggagccccctggatcaggaggaggcttgtgcctccaggcagctgcactctctggcctcgttcagcactgtcacagccagaaggaacccccttcacaatccctgggggatggagttggcagcgtctgaagagt

SEQ ID NO: 130 - DNA, 1922 bp, Homo sapiens
gcgccatctgcctcgattacttcacggaccccgtgtccatcggctgcgggcacaacttctgccgagtttgtgtaacccagttgtggggtggggaggatgaggaggacagagatgagttagatcgggaggaggaggaggaggacggagaggaggaggaagtggaggctgtgggggctggcgcggggtgggacacccccatgcgggatgaagactacgagggtgacatggaggaggaggtcgaggaggaagaagagggtgtgttctggaccagtggcatgagcaggtccagctgggacaacatggactatgtgtgggaggaggaggacgaggaggaagacctggactactacttgggggacatggaggaggaggacctgaggggggaggatgaggaggacgaggaggaagtgctggaggaggttgaggaagaggatctagaccccgtcaccccactgcccccgcctccagcccctcggaggtgcttcacatgccctcagtgccgaaagagctttcctcggcggagcttccgccccaacctgcagctggccaatatggtccaggtgattcggcagatgcacccaacccctggtcgagggagccgcgtgaccgatcagggcatctgtcccaaacaccaagaagccctgaagctcttctgcgaggtagacgaagaggccatctgtgtggtgtgccgagaatccaggagccacaaacagcacagcgtggtgccattggaggaggtggtgcaggagtacaaggccaaactgcaggggcacgtggaaccactgaggaagcacctggaggcagtgcagaagatgaaagccaaggaggagaggcgagtgacagaactgaagagccagatgaagtcagagctggcagcggtggcctcggagtttgggcgactgacacggtttctggctgaagagcaggcagggctggaacggcgtctcagagagatgcatgaagcccagctggggcgtgcgggagccgcggctagtcgccttgcagaacaggccgcccagctcagccgcctgctggcagaggcccaggagcggagccagcaggggggtctccggctgctccaggtgtgaagaggtacagctgcagcccccagaggtctggtcccctgacccgtgccaaccccatagccatgacttcctgacagatgccatcgtgaggaaaatgagccggatgttctgtcaggctgcgagagtggacctgacgctggaccctgacacggctcacccggccctgatgctgtcccctgaccgccggggggtccgcctggcagagcggcggcaggaggttgctgaccatcccaagcgcttctcggccgactgctgcgtactgggggcccagggcttccgctccggccggcactactgggaggagcctaaagaaccctcctggcctccagctcagccttctctcacctactatgtctgtccaacagaccggccagaatttagcttcacttgagagagatctggaatggtcgccatgattgaaaccacgcaccattacatcatcattacattaattacatcaacataaattatttcttcccccttcccttttccagcactcaaccaaggagcaaagctcatcccaccccacacccctcccaggtctgctcactgccaggctcctctcccctttgttcagtggagctggcttttctcccagcccctttccatgcctttcactccatttggcaagctctgagggggagcctggggacgggtttgggtccccaggaggagagccttgggtataatctatttttctaggagcctcttgccttgtcacttgcagctttcgccctctgctttgatggctgaggtgaactcatgttctttgggaaaagggaaggcgtgctgtggaaataaaatgtttatttgcttctcaaaaaaaaaaaaaaaaaa

SEQ ID NO: 131 - DNA, 194 bp, Homo sapiens
tgtacactgccgcaatgtgggtgcagagctgagggactgagctggggcaccagggtgggcagattggcatgagggagagaggaggacctcaagttgggaagagaggcaaagtcagcactggagacagggagtgaaggaagagctgaaggattcagctcctggccagatagttgggatgatgctcttttagatct

SEQ ID NO: 132 - DNA, 1498 bp, Homo sapiens
tactggagggccgggtcccagcctggatgttacccaaccccatgacggaccctttcattgcagcgatctgcacacgtgtgggtgtttccataggacattgtcaggcacagatggctggtccgaagcacgtgcatttcagttttgaggctcctgtcctcaggcagtgtggactcaggccctgggagtcatgtggatgccagtagcctgggcccacagagctgctgggatgtggggggcatatcaagttgaagatggcaactctgatctgacgcctctgtgctcagggcccctggaggaggggctactgccccttggcccttagacaacaggacagagaccagagggactgggcggcttgtcccaggctactgggctgtggtctctgaccccctggaggcctccccacgcctcacagaacacagtgcagacggtgggcggggagagctcgaggggaggcccagccctgcaggtgggactggctctccctccccagccacgagtatgccacagggggctttcaaaaccaggcagggccaagccttggccccactggaggtagagcaccttctgtggctcccgggtgcctttaggcccgtccaggagttggagcagaggagaagacccagactgtgcatagttccctgaggagggctagcctcaggtgccacagcctggttcggcctggcggccccaggacgcagcagcaaccttgggcttcctgcggggtgactaccttgccctccggccctgcccgttgactaactatgctctgtggttttgtttccagagaactcagattgcacagagctagactcgggcagccagagcggcgagctgagtaacaggggtaacacctccctgctgcccctccctctctctccctctctctccctctctctttaccctccccagggctccatctccgcctcaggggcttctccaccccaagtctggctccattcctggccttctgttggtgacagacccccccctaaggtgctcgtttgggggctcttcaggcagcacctcagcctggcacccccactcccctgcacagcccccaggcctcaggaccccacccctctgaggcccaggggagccctgttcacgctggtttctccccaggacccatgagcttcctggctggcctgggccttgctgtgggactggccctgctcctgtactgctatccgccagaccccaagggcctgccagggacccggcgcgtcctcggtttctcgcctgtcatcatcgacagacatgtcagccgctacctgctggccttcctggcagatgacctaggggggctctgacagaccctggacccagggcctcacctgccactcaaccaaagagtcctcgagccggcccgccaaggggactgctgcttctttttctaaatgcatatttttcattatttataatttgtgtaaaaaacacaccttcaccttacaaggtgctgaccatattaaatgttcaggttctctcaaaaaaaaaa

SEQ ID NO: 133 - DNA, 598 bp, Homo sapiens
ctccttcttttccagccccggtaccggaccctgcagccgcagagatgttgatgcctaagaagaaccggattgccatttatgaactcctttttaaggagggagtcatggtggccaagaaggatgtccacatgcctaagcacccggagctggcagacaagaatgtgcccaaccttcatgtcatgaaggccatgcagtctctcaagtcccgaggctacgtgaaggaacagtttgcctggagacatttctactggtaccttaccaatgagggtatccagtatctccgtgattaccttcatctgcccccggagattgtgcctgccaccctacgccgtagccgtccagagactggcaggcctcggcctaaaggtctggagggtgagcgacctgcgagactcacaagaggggaagctgacagagatacctacagacggagtgctgtgccacctggtgccgacaagaaagccgaggctggggctgggtcagcaaccgaattccagtttagaggcggatttggtcgtggacgtggtcagccacctcagtaaaattggagaggattcttttgcattgaataaacttacagccaaaaaaccttaaaaaa

SEQ ID NO: 134 - DNA, 769 bp, Homo sapiens
catcaccccataaacaaataggtttggtcctagcctttctattagctcttagtaagattacacatgcaagcatccccgttccagtgagttcaccctctaaatcaccacgatcaaaagggacaagcatcaagcacgcagcaatgcagctcaaaacgcttagcctagccacacccccacgggaaacagcagtgattaacctttagcaataaacgaaagtttaactaagctatactaaccccagggttggtcaatttcgtgccagccaccgcggtcacacgattaacccaagtcaatagaagccggcgtaaagagtgttttagatcaccccctccccaataaagctaaaactcacctgagttgtaaaaaactccagttgacacaaaatagactacgaaagtggctttaacatatctgaacacacaatagctaagacccaaactgggattagataccccactatgcttagccctaaacctcaacagttaaatcaacaaaactgctcgccagaacactacgagccacagcttaaaactcaaaggacctggcggtgcttcatatccctctagaggagcctgttctgtaatcgataaaccccgatcaacctcaccacctcttgctcagcctatataccgccatcttcagcaaaccctgatgaaggctacaaagtaagcgcaagtacccacgtaaagacgttaggtcaaggtgtagcccatgaggtggcaagaaatgggctacattttctaccccagcaacaatatactctgccggc

SEQ ID NO: 135 - DNA, 2156 bp, Homo sapiens
gagctgaagagacctggagccgacagacgggtgaaggccatgccgccttctgggaaagttccccgaaaggagaatctgtggctacagtgtgagtgggggtcctgctcctttgtgtgctcaaccatggaaaagttctttgagcatgtcactcagcacctgcagcagcacctgcatggctctggggaggaggaggaagaggaagaggaggatgacccacttgaggaagaattctcctgcttgtggcaggaatgtggcttttgttctctggactgttctgctgacctcatccgccatgtctacttccactgctaccacaccaagctgaaacagtgggggctgcaggccttgcaaagccaggctgaccttggcccctgcatcctggacttccagagccggaacgtcatccctgatatccctgaccacttcctgtgtctgtgggagcactgtgagaattccttcgacaatcctgagtggttttatcggcatgtggaagcacacagtctgtgctgtgaatacgaagcagtcggcaaggacaacccggtggtgctgtgtggctggaaaggctgtacctgcaccttcaaggaccgcagtaaacttcgagagcacctccgcagccatacccaggagaaagtggtagcctgccccacctgtgggggcatgtttgccaacaataccaagttcttagatcacatccgtcgccagacctcattggatcagcagcacttccagtgttctcactgttccaagagatttgccacagagcggctattgcgggaccacatgcgcaaccatgtgaatcactataagtgccctctgtgtgacatgacctgcccgctgccttcctccctccgcaaccacatgcgctttcgtcacagtgaggaccggccctttaaatgtgactgttgtgactacagctgcaagaatcttattgacctccagaagcacctggatacccacagcgaggagccagcctacaggtgtgattttgagaactgcaccttcagtgcccgatccctctgctctatcaagtcccattaccgcaaagtacatgaaggagactctgagccaaggtacaaatgtcatgtgtgtgacaaatgcttcacacggggcaacaacctcaccgtgcaccttcgcaagaagcaccagttcaagtggccctcagggcatccccgttttcggtacaaggaacatgaagatggctatatgcggctgcagctggttcgctacgagagtgtagagctgacacagcaactgctgcggcaaccacaagagggatcgggcctgggaacgtcgctgaacgagagcagcctgcagggcattattctagaaacagtgccaggggagccaggacgtaaggaagaggaagaggagggcaagggtagcgaagggacagccctctcagcctctcaggacaaccccagttctgtcatccacgtggtgaatcagaccaatgcccaaggccagcaagagattgtctactatgtgctgtctgaagccccaggggagcctcccccagtccctgagccaccttcagggggcatcatggaaaagcttcaaggaatagctgaggagccagagatccagatggtttgaaggccgcagagccagaccatttcttccccaggtcctgaagtttgagccaggcaagtggcagtgcccctagtgggcagccgttgccaatggatgcctttaggagtggtgccgagagcagtgtggtccactctggcctgggtttgcatcattctgcagactctaaagacttcccttttctgccagactacattttgtggggagcctgaggactctggattctttgaggggatcctggatgtgtgtgttcttgttaaagaggctgttatcaggcttaactataaccctcaagatctgcttgacagtgattaaatccttagctcacatccattcccatctttcgggctccttaggcccaaggatggcatgtgactggtccctgcaagggtcctttctttgtcaccagccaaggcattgataaccaagtagccattttcctcttaaggtttcctctacaaccccaaggactttcatgattatcctcagggacaggattggaggcattgagcgtgtttattaacaagatgtttttggtaataaaaaaaaaaaaaaaaaaaaaaaaaaaa

SEQ ID NO: 136 - DNA, 2035 bp, Homo sapiens
cgagccccgccgaaccgaggccacccggagccgtgcccagtccacgccggccgtgcccggcggccttaagaaccaggcaacctctgccttcttccctcttccactcggagtcgcgctccgcgcgccctcactgcagcccctgcgtcgccgggaccctcgcgcgcgaccagccgaatcgctcctgcagcagagccaacatgcccatcactcggatgcgcatgagaccctggctagagatgcagattaattccaaccaaatcccggggctcatctggattaataaagaggagatgatcttccagatcccatggaagcatgctgccaagcatggctgggacatcaacaaggatgcctgtttgttccggagctgggccattcacacaggccgatacaaagcaggggaaaaggagccagatcccaagacgtggaaggccaactttcgctgtgccatgaactccctgccagatatcgaggaggtgaaagaccagagcaggaacaagggcagctcagctgtgcgagtgtaccggatgcttccacctctcaccaagaaccagagaaaagaaagaaagtcgaagtccagccgagatgctaagagcaaggccaagaggaagtcatgtggggattccagccctgataccttctctgatggactcagcagctccactctgcctgatgaccacagcagctacacagttccaggctacatgcaggacttggaggtggagcaggccctgactccagcactgtcgccatgtgctgtcagcagcactctccccgactggcacatcccagtggaagttgtgccggacagcaccagtgatctgtacaacttccaggtgtcacccatgccctccacctctgaagctacaacagatgaggatgaggaagggaaattacctgaggacatcatgaagctcttggagcagtcggagtggcagccaacaaacgtggatgggaaggggtacctactcaatgaacctggagtccagcccacctctgtctatggagactttagctgtaaggaggagccagaaattgacagcccagggggggatattgggctgagtctacagcgtgtcttcacagatctgaagaacatggatgccacctggctggacagcctgctgaccccagtccggttgccctccatccaggccattccctgtgcaccgtagcagggcccctgggcccctcttattcctctaggcaagcaggacctggcatcatggtggatatggtgcagagaagctggacttctgtgggcccctcaacagccaagtgtgaccccactgccaagtggggatgggcctccctccttgggtcattgacctctcagggcctggcaggccagtgtctgggtttttcttgtggtgtaaagctggccctgcctcctgggaagatgaggttctgagaccagtgtatcaggtcagggacttggacaggagtcagtgtctggctttttcctctgagcccagctgcctggagagggtctcgctgtcactggctggctcctaggggaacagaccagtgaccccagaaaagcataacaccaatcccagggctggctctgcactaagcgaaaattgcactaaatgaatctcgttccaaagaactaccccttttcagctgagccctggggactgttccaaagccagtgaatgtgaaggaaactcccctccttcggggcaatgctccctcagcctcagaggagctctaccctgctccctgctttggctgaggggcttgggaaaaaaacttggcactttttcgtgtggatcttgccacatttctgatcagaggtgtacactaacatttcccccgagctcttggcctttgcatttatttatacagtgccttgctcggggcccaccaccccctcaagccccagcagccctcaacaggcccagggagggaagtgtgagcgccttggtatgacttaaaattggaaatgtcatctaaccattaagtcatgtgtgaacacataaggacgtgtgtaaatatgtacatttgtctttttataaaaagtaaaattgtt

SEQ ID NO: 137 - DNA, 6028 bp, Homo sapiens
ggtgtggacgttgtctaaatttcggtagccatggcacaagaatataagaaagcatgggattatggcaaccacagaatctcagtagtacaagttccattcagttttttctgaaagaaagccctctgttaaagtgaagcaaagaaactgttgtggattataacgtttagaagttccaatttttcagtgctttacaaataaagcatcatttaaccttttaaatgaaaaagattaagatctcatgcaactgttgtattttctggaagccattctccaaaagggaagtgcacatttaaaacacagatatgatggtccttgctgcagggatttaagtctacttgcttttacatcatgaccagcttgaaacggtcacagacagaaaggcctcttgccactgacagggcctctgttgttggcacagacggcacccccaaagtccacactgatgatttctacatgcggcgcttccggtcccaaaatggcagcttaggatcatcagttatggctcctgtaggacccccccgaagtgaaggttctcaccatataacctcaacccccggagtcccaaaaatgggggtaagggcaaggattgcagattggcccccaagaaaggaaaacataaaagaatctagccgttcaagccaggaaatagaaacctcaagttgccttgatagcctgtcctccaaaagcagtcctgtgagtcagggaagttctgttagcctcaattccaatgactcagccatgctgaaaagcatacagaacacgctgaaaaacaagacaagaccgtcggagaacatggactccagatttctcatgcctgaagcctaccccagctcccccagaaaagctcttcgcagaatacgccagcgaagcaacagtgatatcaccataagtgaacttgatgtggatagctttgatgaatgtatctcacctacatacaagactggaccatcactgcacagggaatatggtagcacatcttcaattgataaacagggaacatctggagaaagcttttttgatttgttaaagggctacaaagatgacaaatctgatcgaggtccaactccaaccaagctcagtgactttctcattactggtggtggcaagggttctggtttctctttggatgtaatagacgggcctatctcacagagagagaacctcaggctttttaaggaaagggaaaaaccactcaagcgacgttcaaaatctgaaactggagactcctctatttttcgtaaattgcgcaatgccaaaggtgaagaacttgggaagtcatcagatcttgaagataaccgatcagaagactctgtcaggccctggacatgtccaaagtgctttgcccactatgatgtccagagtatattatttgatttgaatgaggcaattatgaacaggcacaatgttattaagaggagaaacaccaccactggagcttccgcagctgccgtggcatccttggtctctggacctctgtctcattcagccagttttagctccccaatgggcagcacagaggacctgaattccaaaggaagcctcagcatggaccagggagatgataaaagcaatgagcttgtaatgagctgtccatattttcggaatgagataggtggagaaggggagaggaaaatcagcctttcaaaatcaaattctggctcctttagtggatgtgaaagtgcctcctttgagtctacccttagttcccattgcacaaatgcaggagtggcagtacttgaagtgcccaaggagaacttggtgttgcacctagatagagtgaaaagatacatcgtggaacacgtagatctgggtgcatactattatagaaaatttttctaccagaaggaacactggaactattttggggctgatgagaatcttggtccagtggctgtgagcattcgaagggaaaaaccagatgaaatgaaagaaaatggatctccgtacaactaccgaataatttttagaactagtgagctcatgacactgagaggttcggtcctggaggacgccattccgtcgacagccaagcactcgacagccagaggcctgcctctcaaagaagtgctggagcacgtggttcctgagctcaatgtccagtgcctgcggttggccttcaacacacccaaggtcacagagcagctcatgaaactggatgaacaagggctgaactaccagcagaaagtaggcatcatgtactgcaaagctggacagagcactgaagaagagatgtacaacaatgagtcagctggcccagcctttgaagaattccttcaactattgggagagcgagttcggctcaaaggatttgagaagtatcgagcacagcttgataccaaaactgactccactggaacccattctctgtacacaacatacaaagattatgaaattatgttccatgtttctaccatgctgccatacacacccaacaacaaacaacagctcctgaggaagcggcacattggaaatgatatcgtaacaattgttttccaagagcctggagcacagccattcagcccaaaaaacatccgatcccacttccagcacgttttcgtcatcgtcagggtgcacaatccgtgctctgacagtgtctgttatagtgtggctgttaccaggtccagagatgtgccttcctttgggcctcccattcctaaaggggtcactttccctaagtcaaatgtgttcagggacttccttttggcgaaagtgattaatgcagaaaatgctgctcataaatcggagaagtttcgggccatggcaactcggacccgccaggaatacctgaaagatctggcagaaaagaatgtcaccaacacccctatcgacccttctggcaagtttccgttcatctctctggcttccaagaagaaggaaaagtctaagccatatccaggagccgagctcagcagcatgggggccattgtatgggcagtccgggctgaagactacaacaaggccatggaactagactgccttttagggatctccaatgagttcattgtgctcattgaacaggaaacaaagagcgtggtcttcaattgttcctgtagagatgtgatagggtggacttcaactgacaccagcctcaaaatcttctatgaacgaggagaatgtgtttcagtgggtagttttattaacattgaggagatcaaagagattgtcaaaaggttgcagtttgtttcaaaaggctgtgaatcggtggagatgactctgcgaagaaatgggctaggacagcttggcttccatgtcaactatgagggcattgtggcggatgtggagccctacggttatgcctggcaggcagggctgaggcagggcagtcgcctggtggagatctgcaaggtggcggtagccactctgagccatgagcagatgatcgacctcctgagaacatctgtcacggtgaaggttgtcatcattcccccgcatgatgactgcaccccgcggaggagttgctctgaaacctaccgcatgccagtgatggagtacaaaatgaatgaaggtgtttcatacgaattcaagtttcccttccgaaataataacaagtggcagaggaacgccagcaaggggcctcattcacctcaagtcccgtcccaggtgcagagtcccatgacctcgcggctgaatgctggaaaaggagatgggaagatgcctcctccagaaagagccgccaacatccctcgaagcatctccagtgacgggcgcccactagagaggcggctgtctcctggttcggacatctatgtgacggtctcatccatggctttagcaagatcccagtgtcggaactctcctagcaacttgtcttcatccagtgatactggttctgtggggggcacttacaggcagaagtccatgcccgaagggtttggagtgagccgtagatccccagcctccattgacaggcagaacacccagtcagatattggtggcagcggaaaatccacgcctagctggcaaagaagtgaggatagcattgctgaccagatggcttacagttatagaggacctcaggatttcaattcttttgtcctcgagcagcatgaatatacagagccaacatgccatctcccagcagtatcaaaggtactgccagctttccgagagagccccagtgggagattaatgcggcaggatccagtggttcatttgtctccaaacaaacaagggcattctgatagccactactcgagccactccagtagcaatactctctccagcaatgcgtcaagtgcccatagtgatgagaagtggtacgatggggaccgcacagaatccgaactcaacagctataactatctgcaaggcacctctgctgacagtggcattgacaccacctcttatggccccagccacggcagcacagcctcgctgggggctgccacatcgtcacctcgctcagggccaggcaaggagaaagtggcacccctatggcacagctccagtgaagtaatctccatggcagatcggactttggagacagagagccacggcctggaccggaaaacagagtcttccctgagcttagacatacacagcaagagccaagccggctcgacccctctgacaagggagaacagcaccttcagtataaacgatgctgcttcccacacaagtaccatgagctcccgacactctgccagcccagtggttttcaccagtgcccggagttcacctaaagaagagcttcatccagctgccccctcacagctcgcaccatccttctcctcctcttcctcctcctcctctggtcctaggagtttttaccctcgccagggcgctactagcaagtacctgattggatggaaaaaacccgaaggaaccataaactccgtgggatttatggacacgagaaagcgtcatcagagcgatggcaatgaaatagcccacaccaggctgcgtgcctcaaccagagacctccgggcatctcctaagccaacctccaagtccaccattgaagaagatctaaagaaactaattgatcttgaaagcccaactcctgaatcacagaagagttttaagttccacgcactctcctctcctcagtctcctttccccagcacccccacctcacggcgggccttgcacagaacactgtcggacgagagcatttacaatagccagagggagcactttttcacctccagggcgtcacttctggaccaagccctgcccaacgacgtcctcttcagtagcacgtacccttctctccccaagtcgctcccgttgaggaggccttcttacaccttaggaatgaaatcgctgcatggagagttctcagcctcggacagctccctcactgacatccaggagacccgcaggcagcctatgcccgaccctggcctgatgcccctgcctgacactgctgcagacttggattggtccaacctggtagatgctgccaaagcctatgaggtccagagagcctcattttttgctgctagtgatgaaaaccatcgccccttgagtgctgcatccaacagtgatcagctggaggaccaggctctggcccagatgaagccttacagcagcagtaaagactcctctcccactctggcttctaaagtggaccagctggaaggtatgctgaagatgcttcgggaagatttgaagaaggaaaaagaagacaaagctcaccttcaggcggaggtgcagcacctgcgagaggacaacctgaggctacaggaggagtcccagaacgcctcggacaagctgaagaagttcacagaatgggtcttcaacaccatagacatgagctagggaaggctgaggaggacaggagaagggcccagacactccctccagtgagtgtcctgcagcccttattccctccatagaaagcatcctcagagcaccttccctggcttcctactctgccccctttcggggagtgcacaacacaatagttgcagatcaacaatcatcacctgccttttgtagaaaagaaaaacaaaaaaagtaaataaaaattttaaacagtaaaataaaagtttaactgctaaaaaaaaaaaaaaaaaaaaaaaaa

SEQ ID NO: 138 - DNA, 2007 bp, Homo sapiens
gtgcggtggagcgaaatttgaagcaagcggaggcggggcgctctacgaagccggacctgtagcagtttctttggctgcctgggccccttgagtccagccatcatgcctatccgtgctctgtgcactatctgctccgacttcttcgatcactcccgcgacgtggccgccatccactgcggccacaccttccacttgcagtgcctaattcagtcctttgagacagcaccaagtcggacctgcccacagtgccgaatccaggttggcaaaagaaccattatcaataagctcttctttgatcttgcccaggaggaggagaatgtcttggatcgagaattcttaaagaatgaactggacaatgtcagagcccagctttcccagaaagacaaggagaaacgagacagccaggtcatcatcgacactctgcgggatacgctggaagaacgcaatgctactgtggtatctctgcagcaggccttgggcaaggccgagatgctgtgctccacactgaaaaagcagatgaagtacttagagcagcagcaggatgagaccaaacaagcacaagaggaggcgggccggctcaggagcaagatgaagaccatggagcagattgagcttctactccagagccagctccctgaggtggaggagatgatccgagacatgggtgtgggacagtcagcggtggaacagctggctgtgtactgtgtgtctctcaagaaagagtacgagaatctaaaagaggcacggaaggcctcaggggaggtggctgacaagctgaggaaggatttgttttcctccagaagcaagttgcagacagtctactctgaattggatcaggccaagttagaactgaagtcagcccagaaggacttacagagtgctgacaaggaaatcatgagcctgaaaaagaagctaacgatgctgcaggaaaccttgaacctgccaccagtggccagtgagactgtcgaccgcctggttttagagagcccagcccctgtggaggtgaatctgaagctccgccggccatccttccgtgatgatattgatctcaatgctacctttgatgtggatactcccccagcccggccctccagctcccagcatggttactacgaaaaactttgcctagagaagtcacactccccaattcaggatgtccccaagaagatatgcaaaggccccaggaaggagtcccagctctcactgggtggccagagctgtgcaggagagccagatgaggaactggttggtgccttccctatttttgtccggaatgccatcctaggccagaaacagcccaaaaggcccaggtcagagtcctcttgcagcaaagatgtggtaaggacaggcttcgatgggctcggtggccggacaaaattcatccagcctactgacacagtcatgatccgcccattgcctgttaagcccaagaccaaggttaagcagagggtgagggtgaagaccgtgccttctctcttccaggccaagctggacaccttcctgtggtcgtgagaacagtgagtctgaccaatggccagacacatgcctgcaacttgtaggtcaaggactgtccaggcagggtttgtggacagagccctactttcgggaccagcctgaggtgtaagggcagacaaacaggtgagggtgagtgtgacacccagagactgctcttcctgccctcaccctgccccactcctacgactgggagctgacatgaccagcccactgatcctgtcagcaggtcctgctctgttgccaggctcttgtttatagccatgatcagatgtggtcagactctttctgggcctggagaccacggtcacttgttgactgtctctgtggaccagagtgcttgaggcatctcaggcagcctcagcccaagcttctacctgcctttgacttgcttctagcatagcctgggccaagcagggtggggaatggaggatagacatgggatgtatggagaggatggaagattttcccgaaaaaaaaaaaaaaaaaaaaaaa

SEQ ID NO: 139 - DNA, 444 bp, Homo sapiens
ctttagtcaggaaggacgttggtgttgaggttagcatacgtatcaaggacagtaactaccatggctcccgaagttttgccaaaacctcggatgcgtggccttctggccaggcgtctgcgaaatcatatggctgtagcattcgtgctatccctgggggttgcagctttgtataagtttcgtgtggctgatcaaagaaagaaggcatacgcagatttctacagaaactacgatgtcatgaaagattttgaggagatgaggaaggctggtatctttcagagtgtaaagtaatcttggaatataaagaatttcttcaggttgaattacctagaagtttgtcactgacttgtgttcctgaactatgacacatgaatatgtgggctaagaaatagttcctcttgataaataaacaattaacaaatactttgaaaaaaaaaaaaaaaaaaa

SEQ ID NO: 140 - DNA, 488 bp, Homo sapiens
ccgagcagcctaactgggaggcaccccccagcagaggcacactgacacctcacacggcagggtattccaacagacctgcagctgagggtcctgtctgttagaaggaaaactaacaaccagaaaggacatctacaccgaaaacccatctgtacatcaccatcatcaaagaccaaaagtagataaaaccacaaagatggggaaaaaacagaacagaaaaactggaaactctaaaacgcagagcgcctctcctcctccaaaggaacgcagttcctcaccagcaatggaacaaagctggatggagaatgattttgacgagctgagagaagaaggcttcagacgatcaaattactctgagctacgggaggacattcaaaccaaaggcaaagaagttggaaactttgaaaaaaatttagaagaatgtataactagaataaccaatacagagaagtgcttaaaggagctgatggagctgaaaaccaaggctcgag

SEQ ID NO: 141 - DNA, 4620 bp, Homo sapiens
cgccctcgccgcccgcggcgccccgagcgctttgtgagcagatgcggagccgagtggagggcgcgagccagatgcggggcgacagctgacttgctgagaggaggcggggaggcgcggagcgcgcgtgtggtccttgcgccgctgacttctccactggttcctgggcaccgaaagataaacctctcataatgaaggcccccgctgtgcttgcacctggcatcctcgtgctcctgtttaccttggtgcagaggagcaatggggagtgtaaagaggcactagcaaagtccgagatgaatgtgaatatgaagtatcagcttcccaacttcaccgcggaaacacccatccagaatgtcattctacatgagcatcacattttccttggtgccactaactacatttatgttttaaatgaggaagaccttcagaaggttgctgagtacaagactgggcctgtgctggaacacccagattgtttcccatgtcaggactgcagcagcaaagccaatttatcaggaggtgtttggaaagataacatcaacatggctctagttgtcgacacctactatgatgatcaactcattagctgtggcagcgtcaacagagggacctgccagcgacatgtctttccccacaatcatactgctgacatacagtcggaggttcactgcatattctccccacagatagaagagcccagccagtgtcctgactgtgtggtgagcgccctgggagccaaagtcctttcatctgtaaaggaccggttcatcaacttctttgtaggcaataccataaattcttcttatttcccagatcatccattgcattcgatatcagtgagaaggctaaaggaaacgaaagatggttttatgtttttgacggaccagtcctacattgatgttttacctgagttcagagattcttaccccattaagtatgtccatgcctttgaaagcaacaattttatttacttcttgacggtccaaagggaaactctagatgctcagacttttcacacaagaataatcaggttctgttccataaactctggattgcattcctacatggaaatgcctctggagtgtattctcacagaaaagagaaaaaagagatccacaaagaaggaagtgtttaatatacttcaggctgcgtatgtcagcaagcctggggcccagcttgctagacaaataggagccagcctgaatgatgacattcttttcggggtgttcgcacaaagcaagccagattctgccgaaccaatggatcgatctgccatgtgtgcattccctatcaaatatgtcaacgacttcttcaacaagatcgtcaacaaaaacaatgtgagatgtctccagcatttttacggacccaatcatgagcactgctttaataggacacttctgagaaattcatcaggctgtgaagcgcgccgtgatgaatatcgaacagagtttaccacagctttgcagcgcgttgacttattcatgggtcaattcagcgaagtcctcttaacatctatatccaccttcattaaaggagacctcaccatagctaatcttgggacatcagagggtcgcttcatgcaggttgtggtttctcgatcaggaccatcaacccctcatgtgaattttctcctggactcccatccagtgtctccagaagtgattgtggagcatacattaaaccaaaatggctacacactggttatcactgggaagaagatcacgaagatcccattgaatggcttgggctgcagacatttccagtcctgcagtcaatgcctctctgccccaccctttgttcagtgtggctggtgccacgacaaatgtgtgcgatcggaggaatgcctgagcgggacatggactcaacagatctgtctgcctgcaatctacaaggttttcccaaatagtgcaccccttgaaggagggacaaggctgaccatatgtggctgggactttggatttcggaggaataataaatttgatttaaagaaaactagagttctccttggaaatgagagctgcaccttgactttaagtgagagcacgatgaatacattgaaatgcacagttggtcctgccatgaataagcatttcaatatgtccataattatttcaaatggccacgggacaacacaatacagtacattctcctatgtggatcctgtaataacaagtatttcgccgaaatacggtcctatggctggtggcactttacttactttaactggaaattacctaaacagtgggaattctagacacatttcaattggtggaaaaacatgtactttaaaaagtgtgtcaaacagtattcttgaatgttataccccagcccaaaccatttcaactgagtttgctgttaaattgaaaattgacttagccaaccgagagacaagcatcttcagttaccgtgaagatcccattgtctatgaaattcatccaaccaaatcttttattagtacttggtggaaagaacctctcaacattgtcagttttctattttgctttgccagtggtgggagcacaataacaggtgttgggaaaaacctgaattcagttagtgtcccgagaatggtcataaatgtgcatgaagcaggaaggaactttacagtggcatgtcaacatcgctctaattcagagataatctgttgtaccactccttccctgcaacagctgaatctgcaactccccctgaaaaccaaagcctttttcatgttagatgggatcctttccaaatactttgatctcatttatgtacataatcctgtgtttaagccttttgaaaagccagtgatgatctcaatgggcaatgaaaatgtactggaaattaagggaaatgatattgaccctgaagcagttaaaggtgaagtgttaaaagttggaaataagagctgtgagaatatacacttacattctgaagccgttttatgcacggtccccaatgacctgctgaaattgaacagcgagctaaatatagagtggaagcaagcaatttcttcaaccgtccttggaaaagtaatagttcaaccagatcagaatttcacaggattgattgctggtgttgtctcaatatcaacagcactgttattactacttgggtttttcctgtggctgaaaaagagaaagcaaattaaagatctgggcagtgaattagttcgctacgatgcaagagtacacactcctcatttggataggcttgtaagtgcccgaagtgtaagcccaactacagaaatggtttcaaatgaatctgtagactaccgagctacttttccagaagatcagtttcctaattcatctcagaacggttcatgccgacaagtgcagtatcctctgacagacatgtcccccatcctaactagtggggactctgatatatccagtccattactgcaaaatactgtccacattgacctcagtgctctaaatccagagctggtccaggcagtgcagcatgtagtgattgggcccagtagcctgattgtgcatttcaatgaagtcataggaagagggcattttggttgtgtatatcatgggactttgttggacaatgatggcaagaaaattcactgtgctgtgaaatccttgaacagaatcactgacataggagaagtttcccaatttctgaccgagggaatcatcatgaaagattttagtcatcccaatgtcctctcgctcctgggaatctgcctgcgaagtgaagggtctccgctggtggtcctaccatacatgaaacatggagatcttcgaaatttcattcgaaatgagactcataatccaactgtaaaagatcttattggctttggtcttcaagtagccaaagcgatgaaatatcttgcaagcaaaaagtttgtccacagagacttggctgcaagaaactgtatgctggatgaaaaattcacagtcaaggttgctgattttggtcttgccagagacatgtatgataaagaatactatagtgtacacaacaaaacaggtgcaaagctgccagtgaagtggatggctttggaaagtctgcaaactcaaaagtttaccaccaagtcagatgtgtggtcctttggcgtcgtcctctgggagctgatgacaagaggagccccaccttatcctgacgtaaacacctttgatataactgtttacttgttgcaagggagaagactcctacaacccgaatactgcccagaccccttatatgaagtaatgctaaaatgctggcaccctaaagccgaaatgcgcccatccttttctgaactggtgtcccggatatcagcgatcttctctactttcattggggagcactatgtccatgtgaacgctacttatgtgaacgtaaaatgtgtcgctccgtatccttctctgttgtcatcagaagataacgctgatgatgaggtggacacacgaccagcctccttctgggagacatcatagtgctagtactatgtcaaagcaacagtccacactttgtccaatggttttttcactgcctgacctttaaaaggccatcgatattctttgctccttgccataggacttgtattgttatttaaattactggattctaaggaatttcttatctgacagagcatcagaaccagaggcttggtcccacaggccagggaccaatgcgctgcag

SEQ ID NO: 142 - DNA, 5694 bp, Homo sapiens
aagaaaattgcaatgaaagaaacaaaagagctaacgattgcaaccaaatctactaagcagaatgtagctagtgaaaagcagcggcggctgctgtacaacttagagatggagcaaatggctaaaacagccaaagctctgatggaggctgtgagccatgccaaagccccgtttaccagtgccactcacctggaccatgtccggccaatgttcaaactggtgtggacgccactattggcagcctacagcatcggactccagaactgtgatgacactgaagtggcctccttgtgtttggaaggcatccgatgtgcaatccgaatcgcctgcatctttggaatgcagctggaacgagatgcctatgttcaggctcttgctcgcttctccctactcacagccagctccagcatcacagaaatgaagcagaaaaacatcgacaccattaagacgcttatcacagtggctcacaccgatggcaactaccttgggaattcctggcatgagatcttgaaatgcatcagccagctggagctcgctcagctgataggaaccggtgtgaagacgcgctacctgtctggatctgggcgtgaaagagaagggagcctgaagggccacacattggcaggagaagagttcatgggccttggcctcggtaatttggtgagtggcggagtggataaaagacagatggccagcttccaagaatcggttggtgagaccagctcgcagagtgtggttgtagctgtggacaggatttttactgggtctaccagactggatggaaatgcaatagttgactttgtccgctggctgtgtgctgtgtccatggatgaactggcttccccccaccatcctcgcatgttcagcttgcagaagattgtggagatatcatactacaacatgaatcggatccgactacagtggtctcgaatatggcatgtgattggagatcacttcaataaggttggctgcaaccctaatgaagatgtggctatctttgctgttgactcattaaggcaactctccatgaagtttcttgagaagggtgaattagccaacttccgtttccagaaagattttctgaggccctttgagcatattatgaagaaaaacaggtctcccaccatccgggacatggcgatccgctgcattgcccagatggtgaactcccaggcggccaacatccgctcaggctggaagaacatctttgccgtgttccaccaggcagcctctgatcatgatgggaacattgtggagctggccttccagaccacttgccacattgtcacaactattttccagcaccattttcctgcagccatcgattcctttcaggatgctgtgaagtgcttatcagagttcgcctgcaacgccgctttccctgacacgagcatggaagcgattcggctcatccgcttctgtggcaaatacgtctctgagaggcctcgggtgctacaagaatacacaagtgatgacatgaatgtagctcctggtgacagagtctgggtccgaggctggttccccatcttattcgaactctcctgcatcattaatagatgcaagttagatgtacgaacaaggggactcacagtcatgtttgagatcatgaagagctatggccacacctttgagaagcactggtggcaggacctgttcagaatcgtgtttcggatttttgacaatatgaaactccctgagcaactgtcagagaaatctgagtggatgacaacaacctgcaatcacgcactttatgctatttgtgatgtttttacccagttttatgaagctttgaatgaagttcttctttctgatgtatttgcacaattgcagtggtgtgtcaaacaagataatgaacagttggcgcgatcaggtacaaattgcttagaaaacttagtaatatccaatggagagaaattcagtcctgaagtctgggatgaaacctgcaactgtatgttggatattttcaaaacaaccatcccacatgttttgctgacatggagacctgtaggaatggaggaagattcatcagaaaagcatttggatgtggatctggaccgccagtctttaagcagcatagataaaaatccctctgagaggggacagagccagctctctaacccaacagatgacagctggaagggtagaccatacgcaaatcagaaactgtttgccagcctcctcatcaagtgtgtggtccagttggaattgatacagaccattgacaacattgtgttctaccctgcgacgagcaaaaaggaggatgcagagcacatggttgccgcccagcaagacacgctggatgcagatatccacatagagacggaggatcagggcatgtataagtacatgtcttcccagcacctcttcaagctgttggactgtttgcaggaatcccattcattctcaaaggccttcaactccaattacgagcagcggactgtcctgtggcgagcaggttttaagggcaagtctaaacccaatcttctaaaacaagaaaccagcagcctggcctgttgtttgaggatcctgtttcgaatgtatgttgatgagaaccgcagggattcctgggaagaaatacagcagagacttttaactgtttgcagtgaagctcttgcctatttcatcactgtgaattctgagagccatcgggaggcctggacaagtctcttgttgttacttctaactaaaaccctcaaaataaatgatgaaaagttcaaagcacatgcttcaatgtactacccctacttgtgtgaaattatgcagtttgacctgatccctgagctccgagcagttctgcggaagttcttcctacggataggtgttgtgtataagatatggataccagaagagccatcacaggtaccagcagcactgtcaccagtgtggtagccctggctgcccaggccagtgctgcagctctgcagaatgttcagcatgccatttctgactggcacatctcgtgaagtttcatagaaacaaggagttggcatcttggatctcagaatggcctggaaacggatggcctctacgctgttccatcacagtctccaactaaggcttatggtatttcattaaactgttgcatacccagttagcacagtaggtggggagtctgcttcatttctatcattccatttttctgattaaactgtcaaatctgtcattgcatatgccatcgttttctagcaaaatcccatgattggctataaacgttttgtaagaagtcactctccttgaaaatactgaacatagctgtataggtttgtgattattagagaatatgttaataaaacttcttgtaacggctaactgccacctaaaatatgctgggttttctgttgtttgagtgtgttagagaaatttgaatgtttttgtcagttacgagtcagccgtaattagattagtttaaggacaggtcaggattagagaagagttgtttttgtgttttgttaatgtctgagtgatttttaaagtattttacaaaaagatattgaaaatttggttgaaggcagagtttagtaattaagttagaattaagagttttgcgaggttaaaaaaatgtgcctcgtggatctccctgttttagtaacatggagagaaaaagtctacacgaaaaagtgaacaatttaatgaagatgattagccttccttgaaataagtatttgtggatgggtgttaaattaaaatttccagaatacactgtccatctcacacactgtgaaatctaatatatgaagtagtaatgaaaatgaagtagtaatttaaccagagttcatttatccttgaataaacctttttattttcacctcagaaaagtgagtgtactggcagttagtgtcactgctttgcacagtccccattaaaggaccctccagagagggacagtaactgtgcatgagaagccgctcccataagcctcctcagccagatgtcatgggtggaactggagctgtgtcggggccagcacagctgaactgtgacaatggcaggaggtggcatgtgcccagcacttccattaatctgagcctaggagttgaattctttggcaaggttggattctgaggtccttattatgttaatgatggtgcaatactctcacctgcagtagaactgagttctgctgcagcttgtgtaaaagtgggcagtacacaagtacgtcccaaagcctgtgagcagtatacgtggatgctcacccatgagaaggagcacacacgcctcattctctgccctcacccactgctcacctagagcatcgctgagcgttagacaaagtgttacacagaatgattaaaactttcagacttctacctatgctctttagtcctgtaaattgggttgtattgatgtcaactctggtgccttagaagttagtagtttgggaacctatctgtaaaatcagatgttttttctttgtagagaaggatttctggtgcttttgcttactaagagaccgatattcttaagttgttttcttgttttaacagccttgagaaatgtttggttttggccagcagaattcttgtctacttttttctttcccaaaaagtgttttttaatttctctaccaaagaaaaaatgagcaggtttaggtttttacatgacttatatacattagataaaaggagctgtataatttagcaggaaaggactagggagaatactttactgtgagtggaaaatgttagcacatttgactggtttgccctggaatccactgcacctttacactgcaccatgaaacctacactccctggtatcatagcgcgtcatcacctcaacaagtcagtcgtctccattgatatttgtacaaaaggtatacatggggaacacgtgttcattcattaagtccatcttgcgtgcagctatatccctgattggttatttttcctttccttctgaggttctcatgtcattttcttcatcggatgtgactaaaatttttctggtgtcttctgccctctctttaattttgcctcttgaggggtagcagatgtgtcagtgcattttattacttgctgaaacattcaggcttacatttcttattagtttagtattttaaaagatttaattttctgaatgaggcatttgaattgtaccagcaatggacttttaaaaaattggatgtaaaaccattcagggtgatttttcttgtcagtggacagtgacgaacagagatttgaaatcccttacctccaataataagccattcagcctaaattcatttttatgaataaatctcttctttctcatggtaaatgtggcttgtgccactcaaacactagtgaaagggtatgtacaaccgcaacatcaggccaggacaccatttatttaaccaagtaatggaggagagtgaaacattttccaaggccttatttctttttcagaatgctttaagtgttgattatgtgtgctgggtctctagagaagtttttatttgttacaatactgctgctttgagcaattttgtttctcttcattgtctgttaggggaatcaccagctttggcatcttaacaacaaacagtggatgggtaatttttatttctgatacgcatctttagagtcaaatatatcttttccctgtactcctcatgtacaaccaaagaacatacattatgaaaattgtattataatatctggaaacacaacattttcctctggcagttacttttgtacgaaatgaaaaaaaaaaaaaaaa

SEQ ID NO: 143 - DNA, 2617 bp, Homo sapiens
gacttgctccggtttgcagagctaggaggtggcaggctgtgcgctcaaactcaggctgtctaactccacattctgtggggtgagaggatgggtgatggggtgtcttttctggaggagggaggtgctgtgagcctagcgagatggaggtacagtgggtgtgggcctggagcgctgggcccaggcaggggcttctgattaggaagccctggggcaccagttcaggttctcccagagagtagtgtgatgggatccagtaacctgtgccctccagatgacttctgtaggtgtgtttagtgacatgctcaacgggtgcgggaaggatgggcttgtgccaagggccaagcccagagatgtttcagatttttccctttatgcccctgcaaccaagccctgctgctccaggacatataagagacgaaggctgagggctccagcactcaccggcctgggccctgtcacttctctgatagctcccagctcgctctctgcagccatgattgccagacagcagtgtgtccgaggcgggccccggggcttcagctgtggctcggccattgtaggcggtggcaagagaggtgccttcagctcagtctccatgtctggaggtgctggccgatgctcttctgggggatttggcagcagaagcctctacaacctcagggggaacaaaagcatctccatgagtgtggctgggtcacgacaaggtgcctgctttgggggtgctggaggctttggcactggtggctttggtgccggcggcttcggagctggtttcggcactggtggctttggtggtggatttgggggctccttcagtggtaagggtggccctggcttccccgtctgccccgctgggggaattcaggaggtcaccatcaaccagagcttgctcacccccctccacgtggagattgaccctgagatccagaaagtccggacggaagagcgcgaacagatcaagctcctcaacaacaagtttgcctccttcatcgacaaggtgcagttcttagagcaacagaataaggtcctggagaccaaatggaacctgctccagcagcagacgaccaccacctccagcaaaaaccttgagcccctctttgagacctacctcagtgtcctgaggaagcagctagataccttgggcaatgacaaagggcgcctgcagtctgagctgaagaccatgcaggacagcgtggaggacttcaagactaagtatgaagaggagatcaacaaacgcacagcagccgagaatgactttgtggtcctaaagaaggacgtggatgctgcctacctgaacaaggtggagttggaggccaaggtggacagtcttaatgacgagatcaacttcctgaaggtcctctatgatgcggagctgtcccagatgcagacccatgtcagcgacacgtccgtggtcctttccatggacaacaaccgcaacctggacctggacagcattattgccgaggtccgtgcccagtacgaggagattgcccagaggagcaaggctgaggctgaagccctgtaccagaccaaggtccagcagctccagatctcggttgaccaacatggtgacaacctgaagaacaccaagagtgaaattgcagagctcaacaggatgatccagaggctgcgggcagagatcgagaacatcaagaagcagtgccagactcttcaggtatccgtggctgatgcagagcagcgaggtgagaatgcccttaaagatgcccacagcaagcgcgtagagctggaggctgccctgcagcaggccaaggaggagctggcacgaatgctgcgtgagtaccaggagctcatgagtgtgaagctggccttggacatcgagatcgccacctaccgcaaactgctggagggcgaggagtacagaatgtctggagaatgccagagtgccgtgagcatctctgtggtcagcggtagcaccagcactggaggcatcagcggaggattaggaagtggctccgggtttggcctgagtagtggctttggctccggctctggaagtggctttgggtttggtggcagtgtctctggcagttccagcagcaagatcatctctaccaccaccctgaacaagagacgatagaggagacgaggtccctgcagctcactgtgtccagctgggcccagcactggtgtctctgtgcttccttcacttcacctccatcctctgtctctggggctcatcttactagtatcccctccactatcccatgggctctctctgccccaggatgatcttctgtgctgggacagggactctgcctcttggagtttggtagctacttcttgatttgggcctggtgacccacctggaatgggaaggatgtcagctgacctctcacctcccatgggcagagaagaaaatgaccaggagtgtcatctccagaattattggggtcacatatgtcccttcccagtccaatgccatctcccactagatcctgtattatccatctacatcagaaccaaactacttctccaacacccggcagcacttggccctgcaagcttaggatgagaaccacttagtgtcccattctactcctctcattccctcttatccatctgcaggtgaatcttcaataaaatgcttttgtcattc

SEQ ID NO: 144 - DNA, 1586 bp, Homo sapiens
agcgggctttcttcccgagggcggcacgagggctgggcggtggggtgcgggtgcccgggtgaggggcggagctgggggcatggcgtccggagcggctcgctggctagtattggcacccgtcaggtccggggctctccggagcgggcctagcttgaggaaagatggcgatgtctccgccgcatggagcggctcaggccggagcctggtaccgtcggggtcagtcatcgttacccgcagcggcgccattttgcccaaaccggtgaaaatgtccttcggccttctgcgtgtgttctccattgtgatcccctttctctatgtcgggacactcattagcaagaactttgctgctctacttgaggaacatgacatttttgttccagaggatgatgatgatgatgactaacaggaattacagaaaggagaaagcactaactgaagaaatggtgatgctctcagtttctctgccttccctatcagcagaaaggctcggggaaggccctcagcctcccagtctggtgaagcttcctgtatggtccatgaccgtattccaccccaggctctgggaggctccctgagatgtgctgtccactaagcactgcacaaacaagcaatcaaattatgaataaacataataaatatcagccgtgcgtgactgagtgatggctgcagtttctcagtatccctaggttctagttggtgcagttgtctctgctgtcctttatttatgggagaaacataggcccaggctatccaggctgcagtggagcctggtgaactattctgggggccctgggaactattttcattgtttacaaaagcccaacagaaactgtgcattttcccttaagaaagcttcatgggctaactaaagcctcatgccattctgtgttcagtgccagtcatgacagctctgcttgttagcatactacttaaatataactagaatgattcaaaactcgggttctgtgatatgaggatatagataggttttcatctatttcctggcttataactcccaaaacccttgttttaggcttttgttataatgttgggcacttcgggcctcagaaaacagcaggctgtttctcagatcttctcctgacctcctttcacctgctgctttttctccccaaggcaggccatagaaactaaaagtataatcttcctttgcccatcttccagttggccataaaaagaatcctctgacctaccttgtctgattttaggtcatgagacccccatttcagaagggattctgccccatacctgagaggaagaaatgtagacaggccttgttggacttccccactccatctgtattagattatgcctcttttgtccaatcccatttctccagtgttgtccatgcttcaatcatccctatccaatgaggtctccataaaaggcccaagaagacaggtttagagagctttcggagaacagaacacttggctttgcaaagtggcacgcctggagagaacttggaagctccacgccccttctatacctcaccctatgcatctcttcagctgtatcttttgtgatatcctttataataaaccagtaaacggaaaaaaaaaaaaaaa

SEQ ID NO: 145 - DNA, 1324 bp, Homo sapiens
cggcacgagcgccgccgaggattcagcagcctcccccttgagccccctcgcttcccgacgttccgttcccccctgcccgccttctcccgccaccgccgccgccgccttccgcaggccgtttccaccgaggaaaaggaatcgtatcgtatgtccgctatccagaacctccactctttcgacccctttgctgatgcaagtaagggtgatgacctgcttcctgctggcactgaggattatatccatataagaattcaacagagaaacggcaggaagacccttactactgtccaagggatcgctgatgattacgataaaaagaaactagtgaaggcgtttaagaaaaagtttgcctgcaatggtactgtaattgagcatccggaatatggagaagtaattcagctacagggtgaccaacgcaagaacatatgccagttcctcgtagagattggactggctaaggacgatcagctgaaggttcatgggttttaagtgcttgtggctcactgaagcttaagtgaggatttccttgcaatgagtagaatttcccttctctcccttgtcacaggtttaaaaacctcacagcttgtataatgtaaccatttggggtccgcttttaacttggactagtgtaactccttcatgcaataaactgaaaagagccatgctgtctagtcttgaagtccctcatttaaacagaggtcaagcaataggcgcctggcagtgtcaagcctgaaaccaagcaataccgtcatgtttcagccaagcccagagccctaagattacaaacaactatggccggaacctcctcagctctccctctgcagagttccctaccctaagagaatgttaccacctgaacagtcctcggtgaatctgagaggagaggatggggtaaggcagaagcaccagctgtactactagaagggagcttttggtggtagatcccctggtgtctccaacctgactaggtggacagagctcaaagaggccctcttaccgctagcgaggtgataggacatctggcttgccacaaaggtctgttcgaccagacatatcctagctaagggatgtccaaacatcagaatgtgaggccaaccttctatcagagttaaacttttgacaagggaacaaatctcaaactgatccatcagtcatgtagctagctgtagagcttgcaacttaatagcagcagctgcccaatgccatgtgaagtaacaaactggtttttggtttttttttccccttcagttttaatgttatgtgtaatgtatttaaacccttatttaaataaaacttgttttcagaaaaaaaaaaaaaaaaaaaa

SEQ ID NO: 146 - DNA, 3925 bp, Homo sapiens
acagcacagacagattgacctattggggtgtttcgcgagtgtgagagggaagcgccgcggcctgtatttctagacctgcccttcgcctggttcgtggcgccttgtgaccccgggcccctgccgcctgcaagtcggaaattgcgctgtgctcctgtgctacggcctgtggctggactgcctgctgctgcccaactggctggcaagatgaagctctccctggtggccgcgatgctgctgctgctcagcgcggcgcgggccgaggaggaggacaagaaggaggacgtgggcacggtggtcggcatcgacctggggaccacctactcctgcgtcggcgtgttcaagaacggccgcgtggagatcatcgccaacgatcagggcaaccgcatcacgccgtcctatgtcgccttcactcctgaaggggaacgtctgattggcgatgccgccaagaaccagctcacctccaaccccgagaacacggtctttgacgccaagcggctcatcggccgcacgtggaatgacccgtctgtgcagcaggacatcaagttcttgccgttcaaggtggttgaaaagaaaactaaaccatacattcaagttgatattggaggtgggcaaacaaagacatttgctcctgaagaaatttctgccatggttctcactaaaatgaaagaaaccgctgaggcttatttgggaaagaaggttacccatgcagttgttactgtaccagcctattttaatgatgcccaacgccaagcaaccaaagacgctggaactattgctggcctaaatgttatgaggatcatcaacgagcctacggcagctgctattgcttatggcctggataagagggagggggagaagaacatcctggtgtttgacctgggtggcggaaccttcgatgtgtctcttctcaccattgacaatggtgtcttcgaagttgtggccactaatggagatactcatctgggtggagaagactttgaccagcgtgtcatggaacacttcatcaaactgtacaaaaagaagacgggcaaagatgtcaggaaagacaatagagctgtgcagaaactccggcgcgaggtagaaaaggccaaacgggccctgtcttctcagcatcaagcaagaattgaaattgagtccttctatgaaggagaagacttttctgagaccctgactcgggccaaatttgaagagctcaacatggatctgttccggtctactatgaagcccgtccagaaagtgttggaagattctgatttgaagaagtctgatattgatgaaattgttcttgttggtggctcgactcgaattccaaagattcagcaactggttaaagagttcttcaatggcaaggaaccatcccgtggcataaacccagatgaagctgtagcgtatggtgctgctgtccaggctggtgtgctctctggtgatcaagatacaggtgacctggtactgcttgatgtatgtccccttacacttggtattgaaactgtgggaggtgtcatgaccaaactgattccaaggaacacagtggtgcctaccaagaagtctcagatcttttctacagcttctgataatcaaccaactgttacaatcaaggtctatgaaggtgaaagacccctgacaaaagacaatcatcttctgggtacatttgatctgactggaattcctcctgctcctcgtggggtcccacagattgaagtcacctttgagatagatgtgaatggtattcttcgagtgacagctgaagacaagggtacagggaacaaaaataagatcacaatcaccaatgaccagaatcgcctgacacctgaagaaatcgaaaggatggttaatgatgctgagaagtttgctgaggaagacaaaaagctcaaggagcgcattgatactagaaatgagttggaaagctatgcctattctctaaagaatcagattggagataaagaaaagctgggaggtaaactttcctctgaagataaggagaccatggaaaaagctgtagaagaaaagattgaatggctggaaagccaccaagatgctgacattgaagacttcaaagctaagaagaaggaactggaagaaattgttcaaccaattatcagcaaactctatggaagtgcaggccctcccccaactggtgaagaggatacagcagaaaaagatgagttgtagacactgatctgctagtgctgtaatattgtaaatactggactcaggaacttttgttaggaaaaaattgaaagaacttaagtctcgaatgtaattggaatcttcacctcagagtggagttgaaactgctatagcctaagcggctgtttactgcttttcattagcagttgctcacatgtctttgggtgggggggagaagaagaattggccatcttaaaaagcaggtaaaaaacctgggttagggtgtgtgttcaccttcaaaatgttctatttaacaactgggtcatgtgcatctggtgtaggaagttttttctaccataagtgacaccaataaatgtttgttatttacactggtctaatgtttgtgagaagcttctaattagatcaattacttattttaggaaatttaagactagatactcgtgtgtggggtgaggggagggagtatttggtatgttgggataaggaaacacttctatttaatgcttccagggattttttttttttttttttaaccctcctgggcccaagtgatccttccacctcagtctcccagctaattgagaccacaggcttgttaccaccatgctcggcttttgcattaatctaagaaaaggggagagaagttaatccacatctttactcaggcaaggggcatttcacagtgcccaagagtggggttttcttgaacatacttggtttcctatttccccttatctttctaaaactgcctttctggtggctttttttaaaattattactaatgatgcttttatagctgcttggattctctgagaaatgatggggagtgagtgatcactggtattaactttatacacttggatttcatttgtaactttaggatgtaaaggtatattgtgaaccctagctgtgtcagaatctccatccctgaaatttctcattagtggtactggggtgggatcttggatggtgacattgaaactacactaaatcccctcactatgaatgggttgttaaaggcaatggtttgtgtcaaaactggtttaggattacttagattgtgttcctgaagaaaagagtccaggtaaatggtatgatcaataaaggacaggctggtgctaacataaaatccaatattgtaatcctagcactttgggaggccaaggcgggtggatcacaaggtcaagagatagagaccatctttgccaacatggtgaaactccatctctactgaaaatacaaaaattagctgggcgtggtagtgcaagctgaaggctgaggcaggagaatcactcgaacccgggaggcagaggttgcagtgagccgagatcacaccactgtactccagcccggcactccagcctggcgacaagagtgagactccacctcaaaaaaaaaaaaaagaatccaatactgcccaaggataggtattttatagatgggcaactggctgaaaggttaattctctagggctagtagaactggatcccaacaccaaactcttaattagacctaggcctcagctgcactgcccgaaaagcatttgggcagaccctgagcagaatactggtctcaggccaagcccaatacagccattaaagatgacctacagtgctgtgtaccctggggcaatagggttaaatggtagttagcaactagggctagtcttcccttacctcaaaggctctcactaccgtggaccacctagtctgtaactctttctgaggagctgttactgaatattaaaaagatagacttcaaaaaaaaaaaaaaaaaa

SEQ ID NO: 147 - DNA, 5765 bp, Homo sapiens
gtggtgtctcccgacagcatccacagtgtggctccggagaatgaaggaaggctggtgcacatcattggcgccttacggacatccaagcttttgtctgatccaaactatggggtccatcttccggctgtgaaactgcggaggcacgtggagatgtaccaatgggtagaaactgaggagtccagggagtacaccgaggatgggcaggtgaagaaggagacgaggtattcctacaacactgaatggaggtcagaaatcatcaacagcaaaaacttcgaccgagagattggccacaataaccccagtgccatggcagtggagtcattcacggcaacagccccctttgtccaaattggcaggtttttcctctcgtcaggcctcatcgacaaagtcgacaacttcaagtccctgagcctatccaagctggaggaccctcatgtggacatcattcgccgtggagactttttctaccacagcgaaaatcccaagtatccagaggtgggagacttgcgtgtctccttttcctatgctggactgagcggcgatgaccctgacctgggcccagctcacgtggtcactgtgattgcccggcagcggggtgaccagctagtcccattctccaccaagtctggggataccttactgctcctgcaccacggggacttctcagcagaggtgagtgctgtgccctactcgtacggtggaggaacaagcatgtccttccttccttccagtggttatttaataagatcacactaccaggggtcatagccagtgaatgaggcaagaagaagaaatagcggaatgttgagtatgcctcatcaaagtgtttgaccaggagtgtttcagattccagatttttttggatttgcaggtatttgtatatacataatgagatctcttggggatgagaaccaagtctaaacacagaatctatttatgtttcatgtatactttgtacacatcgcctgaaggtgattttatacaatgcaacccgtcacatggggtcaagtgtgggatttccactagtggcgtcatgttggcattcagaaagttttggattttggagcacttcagcatttgggtttttggattgtggatgctgagtctgtcatgaaccctcagtgtgcaggactgtgctaggcactaaactcactgtgcctcacagactgtccggtagaggagtgagagtgacagaaactcgtaagtactgatgcatcgtgccgagtgttggaaagaggagaacaggtgctctgataccagtggacgtcagagtagaacatccgtttctgcagtgatcaagcagggcctctgacaagtgagttttgctgacgagaaggggttaaccctagaagaatcagtgatcagtcagttccagcaagaacagcccagtctgggcacgaaagggttcaccttctaagggggcacccggagtgctgtggccacagcccagagcggggagagggagtgggtgggggggctccaccaaagtctgtgtccttccagaacattaggagggcggggaagggttttgggcctcagctacctgagtatccctctcccattgtaaatagggagggctatgcctaccccgggtcccaaggagaaggggtgccaagatgtgctgattagttcagttctgtgccttaaaagttagcctgtcttctctaggcaggcaatccttctctgcagcagaagaattgagtctttagtttttctgttgttgatgaacacaggtatccctggtggggcactctatacctgccctaaccaggactgctggggttttcattccagagtggccagaaagggtcaaggcagcagacaggcatcaggggttagctgtgaccttttgttcctattattagatcctcagcagccatctgtcccattagcctccagcttgtggtggtgcttgggcctcaccaactcctggtacctggccagggctagggtgtggtcaggctgttgcccaggagcccagttaccaacctcagggtagggctgccacctcccagcctagaaggccatgagtcacccttccaccagcagctgagggtccccagcgagtttctaaaattaggaggcccagtccaggccttgctctctctcccagggctgaggcccagctcacgcagccgcccctccagagaggagtggatggggcccatggcttaggtaatgccccagaaaggaaggccctgcagtgcagatgctcaggcggcctccttaccccctgggtctcctgctgcttagcagccccaaagccctgtcttcccccagcccagcccccacccccacacaaggtctggggtctctgccaagtagaaaaaaggcccagagccaggcaggcagctcagggcaaaagtcaggatgccccgattccagtcccaggggcaggagagtacagctgcccaagcaggcacatcaaataaatggtgagtgataaatgtgacctgtttttgttgttacggactctgagagagggcccgattcagatcagagggtcagggaaagccctctgaagaaatggggttcaagcaaagctcaaaagaatatgtaggaagctggccaggcatgactgcaggcaatcgctgtaggcagagcaaacccacgcgcagatacacaggcgagaggacacttgacctggactggggacagcagccagcagggtcagggcactggcagcagggtcggtgtccggggggtgtggcagggctctggcaggtgactgtgtggagaacacagagtgggtgatagaagcagggccagtgaggctcctgcgggcagacagtggtaagagactcgggaatatgtggcctggactggatggggtggtaggggaggagcgagccatgtctttcccatagatgtgagtgggtgggtgggtgtgccatgtgctgagatggagaaggcgccagtgtcagcactagacaggctgagatgtcaagtggaaatgtcaaggaggtggtggaggtggtgggagctgcagggctgtgaggcccgggagagggccagagctgcagctttaaattggagggtcacggcatgtggaggccaaggaagcagatgggatgtccggggagagagtatggactgaagcagctaaagaattgcagcatctaatggacaggaagaggggcagcgacagcgatggagcctgagaaggagggtgcagtgtccccaagccatgtggagaggttctgagattaaacagatcacacacatagcgcagagcatgctgcccagcagacatcctccaacctgctcaggggtggtgggcagggtcctgctcattccaggtgagaccgtgggctgagggctccaggtgctggcaggctctgagctgaggaaggcccgtacgttccacagagatctcatgccttgccctgtgctctgccagatgggcagaaggacttagccctataggaggcttgcccccgctccgtctggcctgttcagaaatggccaacagctcccgagttggtacagccccctcaggacctgccctgccgactgggtacgccactggccctcagcatcctgacctgcccccaccttgtcctgcaggaggtgtttcatagagaactaaggagcaactccatgaagacctggggcctgcgggcagctggctggatggccatgttcatgggcctcaaccttatgacacggatcctctacaccttggtggactggtttcctgttttccgagacctggtcaacattggcctgaaagcctttgccttctgtgtggccacctcgctgaccctgctgaccgtggcggctggctggctcttctaccgacccctgtgggccctcctcattgccggcctggcccttgtgcccatccttgttgctcggacacgggtgccagccaaaaagttggagtgaaaagaccctggcacccgcccgacacctgcgtgagccctaggatccaggtcctctctcacctctgacccagctccatgccagagcaggagccccggtcaattttggactctgcaccccctctcctcttcaggggccagacttggcagcatgtgcaccaggttggtgttcaccagctcatgtcttccccacatctcttcttgccagtaagcagctttggtgggcagcagcagctcatgaatggcaagctgacagcttctcctgctgtttccttcctctcttggactgagtgggtacggccagccactcagcccattggcagctgacaacgcagacacgctctacggaggcctgctgataaagggctcagccttgccgtgtgctgcttctcatcactgcacacaagtgccatgctttgccaccaccaccaagcacatctgtgatcctgaagggcggccgttagtcattactgctgagtcctgggtcaccagcagacacactgggcatggacccctcaaagcaggcacacccaaaacacaagtctgtggctagaacctgatgtggtgtttaaaagagaagaaacactgaagatgtcctgaggagaaaagctggacatatactgggcttcacacttatcttatggcttggcagaatctttgtagtgtgtgggatctctgaaggccctatttaagtttttcttcgttactttgctgcttcatgtgtactttcctaccccaagaggaagttttctgaaataagatttaaaaacaaaacaaaaaaaacacttaatatttcagactgttacaggaaacaccctttagtctgtcagttgaattcagagcactgaaaggtgttaaattggggtatgtggtttgattgataaaaagttacctctcagtattttgtgtcactgagaagctttacaatggatgcttttgaaacaagtatcagcaaaaggatttgttttcactctgggaggagagggtggagaaagcacttgctttcatcctctggcatcggaaactcccctatgcacttgaagatggtttaaaagattaaagaaacgattaagagaaaaggttggaagctttatactaaatgggctccttcatggtgacgccccgtcaaccacaatcaagaactgaggcctgaggctggttgtacaatgcccacgcctgcctggctgctttcacctgggagtgctttcgatgtgggcacctgggcttcctagggctgcttctgagtggttctttcacgtgttgtgtccatagctttagtcttcctaaataagatccacccacacctaagtcacagaatttctaagttccccaactactctcacacccttttaaagataaagtatgttgtaaccaggatgtcttaaatgattctttgtgtaccttttctgtcatattcagaaaccgttttgtgcctgctgggagtaattcctttagcaattaagtatttggtagctgaataaggggtcagaacttctgaaaccagagatctgtaatcatctctattggcctggggtgcctgtgctataaatgagtttcttcacatgaaaaacacagccagcccaagatgacttatctgggtttaggattcaatagtattcactaactgcttattacatgagcaatttcatcaaatctccaaactcttaaaggatgctttcggaaaacacgctgtatacctagatgatgactaaatgcaaaatccttgggctttggtttttttctagtaaggattttaaataactgccgacttcaaaagtgttcttaaaacgaaagataatgttaagaaaaatttgaaagctttggaaaaccaaatttgtaatatcattgtattttttattaaaagttttgtaataaatttct

SEQ ID NO: 148 - DNA, 6614 bp, Homo sapiens
ctgcgcgccgctggcgctgaggggaggaagtttgctgtcgagcggcctgggttccgtgggcaaggccgtgggaggcagcgttggctgcttcgacacactgagggcggcgcgatgggagacgagatggatgccatgattcccgagcgggagatgaaggattttcagtttagagcgctaaagaaggtgagaatctttgactcccctgaggaattgcccaaggaacgctcgagtctgcttgctgtgtccaacaaatatggtctggtcttcgctggtggagccagtggcttgcagatttttcctactaaaaatcttcttattcaaaataaacccggagatgatcccaacaaaatagttgataaagtccaaggcttgctagttcctatgaaattcccaatccatcacctggccttgagctgtgataacctcacactctctgcgtgcatgatgtccagtgaatatggttccattattgctttttttgatgttcgcacattctcaaatgaggctaaacagcaaaaacgcccatttgcctatcataagcttttgaaagatgcaggaggcatggtgattgatatgaagtggaaccccactgtcccctccatggtggcagtttgtctggctgatggtagtattgctgtcctgcaagtcacggaaacagtgaaagtatgtgcaactcttccttccacggtagcagtaacctctgtgtgctggagccccaaaggaaagcagctggcagtgggaaaacagaatggaactgtggtccagtatcttcctactttgcaggaaaaaaaagtcattccttgtcctccgttttatgagtcagatcatcctgtcagagttctggatgtgctgtggattggtacctacgtcttcgccatagtgtatgctgctgcagatgggaccctggaaacgtctccagatgtggtgatggctctactaccgaaaaaagaagaaaagcacccagagatatttgtgaactttatggagccctgttatggcagctgcacggagagacagcatcattactacctcagttacattgaggaatgggatttagtgctggcagcatctgcggcttcaacagaagttagtatccttgctcgacaaagtgatcagattaattgggaatcttggctactggaggattctagtcgagctgaattgcctgtgacagacaagagtgatgactccttgcccatgggagttgtcgtagactatacaaaccaagtggaaatcaccatcagtgatgaaaagactcttcctcctgctccagttctcatgttactttcaacagatggtgtgctttgtccattttatatgattaatcaaaatcctggggttaagtctctcatcaaaacaccagagcgactttcattagaaggagagcgacagcccaagtcaccaggaagtactcccactaccccaacctcctctcaagccccacagaaactggatgcttctgcagctgcagcccctgcctctctgccaccttcatcacctgctgctcccattgccactttttctttgcttcctgctggtggagcccccactgtgttctcctttggttcttcatctttgaagtcatctgctacggtcactggggagcccccttcatattccagtggctccgacagctccaaagcagccccaggccctggcccatcaaccttctcttttgttcccccttctaaagcctccctagcccccacccctgcagcgtctcctgtggctccatcagctgcttcattctcctttggatcatctggttttaagcctaccctggaaagcacaccagtgccaagtgtgtctgctccaaatatagcaatgaagccctccttcccaccctcaacctctgctgtcaaagtcaaccttagtgaaaagtttactgctgcagctacctctactcctgttagtagctcccagagcgcacccccgatgtcgccattctcttctgcctccaagccagctgcttctggaccactcagccaccccacacctctctcagcaccacctagttccgtgccattgaagtcctcagtcttgccctcaccatcaggacgatctgctcagggcagttcaagcccagtgccctcaatggtacagaaatcacccaggataacccctccagcggcaaagccaggctctccccaggcaaagtcacttcagcctgctgttgcagaaaagcagggacatcagtggaaagattcagatcctgtaatggctggaattggggaggagattgcacactttcagaaggagttggaagagttaaaagcccgaacttccaaagcctgtttccaagtgggcacttctgaggagatgaagatgctgcgaacagaatcagatgacttgcatacctttcttttggagattaaagagaccacagagtcgcttcatggagatataagtagcctgaaaacaactttacttgagggctttgctggtgttgaggaagccagagaacaaaatgaaagaaatcgtgactctggttatctgcatttgctttataaaagaccactggatcccaagagtgaagctcagcttcaggaaattcggcgccttcatcagtatgtgaaatttgctgtccaagatgtgaatgatgttctagacttggagtgggatcagcatctggaacaaaagaaaaaacaaaggcacctgcttgtgccagagcgagagacactgtttaacaccctagccaacaatcgggaaatcatcaaccaacagaggaagaggctgaatcacctggtggatagtcttcagcagctccgcctttacaaacagacttccctgtggagcctgtcctcggctgttccttcccagagcagcattcacagttttgacagtgacctggaaagcctgtgcaatgctttgttgaaaaccaccatagaatctcacaccaaatccttgcccaaagtaccagccaaactgtcccccatgaaacaggcacaactgagaaacttcttggccaagaggaagaccccaccagtgagatccactgctccagccagcctgtctcgatcagcctttctgtctcagagatattatgaagacttggatgaagtcagctcaacgtcatctgtctcccagtctctggagagtgaagatgcacggacgtcctgtaaagatgacgaggcagtggttcaggcccctcggcacgcccccgtggttcgcactccttccatccagcccagtctcttgccccatgcagcaccttttgctaaatctcacctggttcatggttcttcacctggtgtgatgggaacttcagtggctacatctgctagcaaaattattcctcaaggggccgatagcacaatgcttgccacgaaaaccgtgaaacatggtgcacctagtccttcccaccccatctcagccccgcaggcagctgccgcagcagcactcaggcggcagatggccagtcaggcaccagctgtaaacactttgactgaatcaacgttgaagaatgtccctcaagtggtaaatgtgcaggaattgaagaataaccctgcaaccccttctacagccatgggttcttcagtgccctactccacagccaaaacacctcacccagtgttgaccccagtggctgctaaccaagccaagcaggggtctctaataaattcccttaagccatctgggcctacaccagcatccggtcagttatcatctggtgacaaagcttcagggacagccaagatagaaacagctgtgacttcaaccccatctgcttctgggcagttcagcaagcctttctcattttctccatcagggactggctttaattttgggataatcacaccaacaccgtcttctaatttcactgctgcacaaggggcaacaccctccactaaagagtcaagccagccggacgcattctcatctggtgggggaagcaaaccttcttatgaggccattcctgaaagctcacctccctcaggaatcacatccgcatcaaacaccaccccaggagaacctgccgcatctagcagcagacctgtggcaccttctggaactgctctttccaccacctctagtaagctggaaaccccaccgtccaagctgggagagcttctgtttccaagttctttggctggagagactctgggaagtttttcaggactgcgggttggccaagcagatgattctacaaaaccaaccaataaggcttcatccacaagcctaactagtacccagccaaccaagacgtcaggcgtgccctcagggtttaattttactgcccccccggtgttagggaagcacacggagccccctgtgacatcctctgcaaccaccacctcagtagcaccaccagcagccaccagcacttcctcaactgccgtttttggcagtctgccagtcaccagtgcaggatcctctggggtcatcagttttggtgggacatctctaagtgctggcaagactagtttttcatttggaagccaacagaccaatagcacagtgcccccatctgccccaccaccaactacagctgccactccccttccaacatcattccccacattgtcatttggtagcctcctgagttcagcaactaccccctccctgcctatgtccgctggcagaagcacagaagaggccacttcatcagctttgcctgagaagccaggtgacagtgaggtctcagcatcagcagcctcacttctagaggagcaacagtcagcccagcttccccaggctcctccgcaaacttctgactctgttaaaaaagaacctgttcttgcccagcctgcagtcagcaactctggcactgcagcatctagtactagtcttgtagcactttctgcagaggctaccccagccaccacgggggtccctgatgccaggacggaggcagtaccacctgcttcctccttttctgtgcctgggcagactgctgtcacagcagctgctatctcaagtgcaggccctgtggccgtcgaaacatcaagtacccccatagcctccagcaccacgtccattgttgctcccggcccatctgcagaggcagcagcatttggtaccgtcacttctggctcatccgtctttgctcagcctcctgctgccagttctagctcagctttcaaccagctcaccaacaacacagccactgccccctctgccacgcccgtgtttgggcaagtggcagccagcaccgcaccaagtctgtttgggcagcagactggtagcacagccagcacagcagctgccacaccacaggtcagcagctcagggtttagcagcccagcttttggtaccacagccccaggggtctttggacagacaaccttcgggcaggcctcagtctttgggcagtcggcgagcagtgctgcaagtgtcttttccttcagtcagcctgggttcagttccgtgcctgccttcggtcagcctgcttcctccactcccacatccaccagtggaagtgtctttggtgccgcctcaagtaccagtagctccagttccttctcatttggacagtcttctcccaacacaggaggggggctgtttggccaaagcaacgctcctgcttttgggcagagtcctggctttggacagggaggctctgtctttggtggtacctcagctgccaccacaacagcagcaacctctgggttcagcttttgccaagcttcaggttttgggtctagtaatactggttctgtgtttggtcaagcagccagtactggtggaatagtctttggccagcaatcatcctcttccagtggtagcgtgtttgggtctggaaacactggaagagggggaggtttcttcagtggccttggaggaaaacccagtcaggatgcagccaacaaaaacccattcagctcggccagtgggggctttggatccacagctacctcaaatacctctaacctatttggaaacagtggggccaagacatttggtggatttgccagctcgtcgtttggagagcagaaacccactggcactttcagctctggaggaggaagtgtggcatcccaaggctttgggttttcctctccaaacaaaacaggtggcttcggtgctgctccagtgtttggcagccctcctacttttgggggatcccctgggtttggaggggtgccagcattcggttcagccccagcctttacaagccctctgggctcgacgggaggcaaagtgttcggagagggcactgcagctgccagcgcaggaggattcgggtttgggagcagcagcaacaccacatccttcggcacgctcgcgagtcagaatgcccccactttcggatcactgtcccaacagacttctggttttgggacccagagtagcggattctctggttttggatcaggcacaggagggttcagctttgggtcaaataactcgtctgtccagggttttggtggctggcgaagctgagggcgtgtcagcaggcctttcgatccctgggaccaaccgcatcctcagcttcttccccgagaaatgctggagcaggctgttcagaccgacgttgccatcaaaacacatacacccagaaagaaacaacagaaaccaaaactcacaaggcgcatgattacttgttttatatttcatgttgggttttccctcccactattaaacagtctgtttccgtacaaaaaaaaaaaaaa

SEQ ID NO: 149 - DNA, 1206 bp, Homo sapiens
ggcacgaggctcaggaaaccagggctgtcacgtgtataacctcaggtttgtcacgtgtataacctcaggaaaccagggctgtcacgtgtataacccaggtttcctgaggtttgtgagggttttatgtggcatgtcttctgatgaaaggaaagcattcttgcagtttaccactggttgttcaactctacccccaggtggactggctaacctgcatcccaggctcacggttgtacgcaaggttgatgctactgatgcaagctatccatcagtcaatacatgtgtgcattaccttaagttgcctgaatattcttccgaggagatcatgagagagcgcctgctagctgctacaatggagaaaggctttcatttcaattgagctttgaagtgcaatgggagacatcagagactttaaaaatactagtgaagcctcttgtgtttgtgtgcagagaagtatatgatccaccatgctaatgacacttgcctttttttccaccattaaggctttaagaacatgtggaataagttttttagctgctaatgacaaaacaaatcctgtaactacccagccagcaagtatatagcacagaacactgtgttactttacaagggcttatgtgactggaataaggtggtcccacttgactgttccaaagagcagcttctcagatcttcagtgttcactggtaaatttctaacagtgtatttgtgtaaagtttgtcatttcatactccatacactacagttgctgtcactgatccctgttttgctggcttttaagctacttggtcaaaaatcctgcttccttaaaacatagagaattaatgagcatctcaagctttttcttttcctttttaatgatgcctgcactatcaagagtattctagtgttctctctttgtttggcatataatcatgcaccaaactttttatttctttaaggtgggagtatatttttatttcctaaatgccatactatgaagatcaaagtcttaagtgtgtttgcagctcaaaaataaagatgtattaaggggggaaaacctggtctaagtgcaaggcacacttacagcgagttttactttcggttgtattttctttgtatattataaacatttatttaacttgttgccgtttgaagtaaaaaatttccaaaatgtatgctcaacaataatcattaaaatgtttgcagcgtaaaaaaaaaaaaaaaaaa

SEQ ID NO: 150 - DNA, 4148 bp, Homo sapiens
aggaaggaaggagcagttggttcaatctctggtaatctatgccagcaattatgacaatgttagcagaccatgcagctcgtcagctgcttgatttcagccaaaaactggatatcaacttattagataatgtggtgaattgcttataccatggagaaggagcccagcaaagaatggctcaagaagtactgacacatttaaaggagcatcctgatgcttggacaagagtcgacacaattttggaattttctcagaatatgaatacgaaatactatggactacaaattttggaaaatgtgataaaaacaaggtggaagattcttccaaggaaccagtgcgaaggaataaaaaaatacgttgttggcctcattatcaagacgtcatctgacccaacttgtgtagagaaagaaaaggtgtatatcggaaaattaaatatgatccttgttcagatactgaaacaagaatggcccaaacattggccaacttttatcagtgatattgttggagcaagtaggaccagcgaaagtctctgtcaaaataatatggtgattcttaaactcttgagtgaagaagtatttgatttctctagtggacagataacccaagtcaaatctaagcatttaaaagacagcatgtgcaatgaattctcacagatatttcaactgtgtcagtttgtaatggaaaattctcaaaatgctccacttgtacatgcaaccttggaaacattgctcagatttctgaactggattcccctgggatatatttttgagaccaaattaatcagcacattgatttataagttcctgaatgttccaatgtttcgaaatgtctctctgaagtgcctcactgagattgctggtgtgagtgtaagccaatatgaagaacaatttgtaacactatttactctgacaatgatgcaactaaagcagatgcttcctttaaataccaatattcgacttgcgtactcaaatggaaaagatgatgaacagaacttcattcaaaatctcagtttgtttctctgcacctttcttaaggaacatgatcaacttatagaaaaaagattaaatctcagggaaactcttatggaggcccttcattatatgttgttggtatctgaagtagaagaaactgaaatctttaaaatttgtcttgaatactggaatcatttggctgctgaactctatagagagagtccattctctacatctgcctctccgttgctttctggaagtcaacattttgatgttcctcccaggagacagctatatttgcccatgttattcaaggtccgtttattaatggttagtcgaatggctaaaccagaggaagtattggttgtagagaatgatcaaggagaagttgtgagagaattcatgaaggatacagattccataaatttgtataagaatatgagggaaacattggtttatcttactcatctggattatgtagatacagaaagaataatgacagagaagcttcacaatcaagtgaatggtacagagtggtcatggaaaaatttgaatacattgtgttgggcaataggctccattagtggagcaatgcatgaagaggacgaaaaacgatttcttgttactgttataaaggatctattaggattatgtgaacagaaaagaggcaaagataataaagctattattgcatcaaatatcatgtacatagtaggtcaatacccacgttttttgagagctcactggaaatttctgaagactgtagttaacaagctgttcgaattcatgcatgagacccatgatggagtccaggatatggcttgtgatactttcattaaaatagcccaaaaatgccgcaggcatttcgttcaggttcaggttggagaagtgatgccatttattgatgaaattttgaacaacattaacactattatttgtgatcttcagcctcaacaggttcatacgttttatgaagctgtggggtacatgattggtgcacaaacagatcaaacagtacaagagcacttgatagaaaagtacatgttactccctaatcaagtgtgggatagtataatccagcaggcaaccaaaaatgtggatatactgaaagatcctgaaacagtcaagcagcttggtagcattttgaaaacaaatgtgagagcctgcaaagctgttggacacccctttgtaattcagcttggaagaatttatttagatatgcttaatgtatacaagtgcctcagtgaaaatatttctgcagctatccaagctaatggtgaaatggttacaaagcaaccattgattagaagtatgcgaactgtaaaaagggaaactttaaagttaatatctggttgggtgagccgatccaatgatccacagatggtcgctgaaaattttgttccccctctgttggatgcagttctcattgattatcagagaaatgtcccagctgctagagaaccagaagtgcttagtactatggccataattgtcaacaagttagggggacatataacagctgaaatacctcaaatatttgatgctgtttttgaatgcacattgaatatgataaataaggactttgaagaatatcctgaacatagaacgaactttttcttactacttcaggctgtcaattctcattgtttcccagcattccttgctattccacctacacagtttaaacttgttttggattccatcatttgggctttcaaacatactatgaggaatgtcgcagatacgggcttacagatactttttacactcttacaaaatgttgcacaagaagaagctgcagctcagagtttttatcaaacttatttttgtgatattctccagcatatcttttctgttgtgacagacacttcacatactgctggtttaacaatgcatgcatcaattcttgcatatatgtttaatttggttgaagaaggaaaaataagtacatcattaaatcctggaaatccagttaacaaccaaatctttcttcaggaatatgtggctaatctccttaagtcggccttccctcacctacaagatgctcaagtaaagctctttgtgacagggcttttcagcttaaatcaagatattcctgctttcaaggaacatttaagagatttcctagttcaaataaaggaatttgcaggtgaagacacttctgatttgtttttggaagagagagaaatagccctacggcaggctgatgaagagaaacataaacgtcaaatgtctgtccctggcatctttaatccacatgagattccagaagaaatgtgtgattaaaatccaaattcatgctgttttttttctctgcaactccgttagcagaggaaaacagcatgtgggtatttgtcgaccaaaatgatgccaatttgtaaattaaaatgtcacctagtggccctttttcttatgtgtttttttgtataagaaattttctgtgaaatatccttccattgtttaagcttttgttttggtcatctttatttagtttgcatgaagttgaaaattaaggcatttttaaaaattttacttcatgcccatttttgtggctgggctggggggaggaggcaaattcaatttgaacatatacttgtaattctaatgcaaaattatacaatttttcctgtaaacaataccaatttttaattagggagcattttccttctagtctatttcagcctagaagaaaagataatgagtaaaacaaattgcgttgtttaaaggattatagtgctgcattgtctgaagttagcacctcttggactgaatcgtttgtctagactacatgtattacaaagtctctttggcaagattgcagcaagatcatgtgcatatcatcccattgtaaagcgacttcaaaaatatgggaacacagttagttatttttacacagttctttttgtttttgtgtgtgtgtgctgtcgcttgtcgacaacagctttttgttttcctcaatgaggagtgttgctcatttgtgagccttcattaactcgaagtgaaatggttaaaaatatttatcctgttagaataggctgcatctttttaacaactcattaaaaaacaaaacaactctggcttttgagatgacttatactaatttacattgtttaccaagctgtagtgctttaagaacactacttaaaaagcaaaataaacttggtttacatttaaaaaaaa

SEQ ID NO: 151 - DNA, 602 bp, Homo sapiens
  misc_feature (445)..(445): Wherein n may be a, c, g or t
  misc_feature (452)..(452): Wherein n may be a, c, g or t
  misc_feature (463)..(463): Wherein n may be a, c, g or t
  misc_feature (485)..(485): Wherein n may be a, c, g or t
  misc_feature (502)..(502): Wherein n may be a, c, g or t
  misc_feature (520)..(520): Wherein n may be a, c, g or t
  misc_feature (528)..(528): Wherein n may be a, c, g or t
  misc_feature (552)..(552): Wherein n may be a, c, g or t
  misc_feature (565)..(565): Wherein n may be a, c, g or t
ttttttttttttgagtttgacaaatttattggtactttagtaaagacattcatctcagtcatttctctctcccagcttgaccttaggttaatatttcatttgggtcaagaaaataatacgtaggagaggtatgttattttaacaaacaggaaaatggacaaaaaattgatagtttgcctacattaaagtaagttaaattcatgtatcgatataattaaatcatgtaagaactaagagttctatatacatttccattgtcttacttgggcttattctaaacttaaatgctagtgaacaaagtgttaggaatatacacaggctgcttctctggagttattaccaactaaaagacctcagcaagcagctaccaccaataaaacagtctgaagctgcctccaaatataatattgtaggagttttcaaggaaatttttatactgtatgcntttgtcngtgactatgcntttaaagatgtgtttaacggcnaatttaaaaaaagttcntataccatccaaaattcnaaaccacnccctaccatacccaatctaccaangtatatgtggtgngatcccaaaatggttggaagatgcatttccttccccc

SEQ ID NO: 152 - DNA, 1522 bp, Homo sapiens
caggtgtggattccgccggtgaaggctgaaggcagctaccttaaagatgccgggatccgcagcgaagggctcggagttgtcagagaggatcgagagcttcgtggagaccctgaagcggggtggtgggccgcgcagctccgaggaaatggctcgggagaccctagggttgctgcgccagatcatcacggaccaccgctggagcaacgcgggggagctgatggagctgatccgcagagagggcaggaggatgacggccgctcagccctccgagaccaccgtgggcaacatggtgcggagagtgctcaagattatccgggaggagtatggcagactccatggacgcagcgacgagagtgatcagcaggagtccctgcacaaactgttgacatccggaggcctaaacgaggatttcagcttccattatgcccaactccagtccaacatcattgaggcgattaatgagctgctagtggagctggaagggacaatggagaacattgcagcccaggctctggagcacattcactccaatgaggtgatcatgaccattggcttctcccgaacagtagaggccttcctcaaagaggctgcccgaaagaggaaattccatgtcattgtagcagagtgtgctcctttctgccagggtcatgaaatggctgtgaatttgtccaaagcaggtattgagacaactgtcatgactgatgctgccatttttgccgttatgtcaagagtcaacaaggtgatcattggcacgaagaccatcctggccaatggggccctgagagctgtgacaggaactcacactctggcactggcagcaaaacaccattccaccccactcatcgtctgtgcacctatgttcaaactttctccacagttccccaatgaagaagactcatttcataagtttgtggctcctgaagaagtcctgccattcacagaaggggacattctggagaaggtcagcgtgcattgccctgtgtttgactacgttcccccagagctcattaccctctttatctccaacattggtgggaatgcaccttcctacatctaccgcctgatgagtgaactctaccatcctgatgatcatgttttatgaccgaccacacgtgtcctaagcagattgcttaggcagatacagaatgaagaggagacttgagtgttgctgctgaagcacatccttgcaatgtgggagtgcacaggagtccacctaaaaaaaaaatccttgatactgttgcctgcctttttagtcaccccgtaacaagggcacacatccagcactgtgtcttgcctttcagatcttaacagagcagcagggcttaacttgttgattttggagcctcttagtgacctggttgcgtctgtgtcaggaacttaaactttctggttcagtagtgtgttaaacataacactgaataccttactgggatacagatttttgctcagaaatggctatgacactttttctaggctctaccaataaaagccacttgaaggttcaaaaaaaaaaaaaaaaaaa

SEQ ID NO: 153 - DNA, 4031 bp, Homo sapiens
ctcttttttttcccggcagatctttgttgtgtgggagggcagcagggatggacttgagcttgcggatcccctgctagagcagccgcgctcggagaaggcgccgcagccgcgaggaggagccgccgccgccgcgcccgaggccccgccgcccgcggcctctgtcggcccgcgccccgctcgcccgtcgcccccgtcgcccctcgcctccccgcagagtcccctcgcggcagcagatgtgtgtggggtcagcccacggcggggactatggtgaaattcccggcgctcacgcactactggcccctgatccggttcttggtgcccctgggcatcaccaacatagccatcgacttcggggagcaggccttgaaccggggcattgctgctgtcaaggaggatgcagtcgagatgctggccagctacgggctggcgtactccctcatgaagttcttcacgggtcccatgagtgacttcaaaaatgtgggcctggtgtttgtgaacagcaagagagacaggaccaaagccgtcctgtgtatggtggtggcaggggccatcgctgccgtctttcacacactgatagcttatagtgatttaggatactacattatcaataaactgcaccatgtggacgagtcggtggggagcaagacgagaagggccttcctgtacctcgccgcctttcctttcatggacgcaatggcatggacccatgctggcattctcttaaaacacaaatacagtttcctggtgggatgtgcctcaatctcagatgtcatagctcaggttgtttttgtagccattttgcttcacagtcacctggaatgccgggagcccctgctcatcccgatcctctccttgtacatgggcgcacttgtgcgctgcaccaccctgtgcctgggctactacaagaacattcacgacatcatccctgacagaagtggcccggagctggggggagatgcaacaataagaaagatgctgagcttctggtggcctttggctctaattctggccacacagagaatcagtcggcctattgtcaacctctttgtttcccgggaccttggtggcagttctgcagccacagaggcagtggcgattttgacagccacataccctgtgggtcacatgccatacggctggttgacggaaatccgtgctgtgtatcctgctttcgacaagaataaccccagcaacaaactggtgagcacgagcaacacagtcacggcagcccacatcaagaagttcaccttcgtctgcatggctctgtcactcacgctctgtttcgtgatgttttggacacccaacgtgtctgagaaaatcttgatagacatcatcggagtggactttgcctttgcagaactctgtgttgttcctttgcggatcttctccttcttcccagttccagtcacagtgagggcgcatctcaccgggtggctgatgacactgaagaaaaccttcgtccttgcccccagctctgtgctgcggatcatcgtcctcatcgccagcctcgtggtcctaccctacctgggggtgcacggtgcgaccctgggcgtgggctccctcctggcgggctttgtgggagaatccaccatggtcgccatcgctgcgtgctatgtctaccggaagcagaaaaagaagatggagaatgagtcggccacggagggggaagactctgccatgacagacatgcctccgacagaggaggtgacagacatcgtggaaatgagagaggagaatgaataaggcacgggacgccatgggcactgcagggacagtcagtcaggatgacacttcggcatcatctcttccctctcccatcgtattttgttcccttttttttgttttgttttggtaatgaaagaggccttgatttaaaggtttcgtgtcaattctctagcatactgggtatgctcacactgacggggggacctagtgaatggtctttactgttgctatgtaaaaacaaacgaaacaactgacttcatacccctgcctcacgaaaacccaaaagacacagctgcctcacggttgacgttgtgtcctcctcccctggacaatctcctcttggaaccaaaggactgcagctgtgccatcgcgcctcggtcaccctgcacagcaggccacagactctcctgtcccccttcatcgctcttaagaatcaacaggttaaaactcggcttcctttgatttgcttcccagtcacatggccgtacaaagagatggagccccggtggcctcttaaatttcccttccgccacggagttcgaaaccatctactccacacatgcaggaggcgggtggcacgctgcagcccggagtccccgttcacactgaggaacggagacctgtgaccacagcaggctgacagatggacagaatctcccgtagaaaggtttggtttgaaatgccccgggggcagcaaactgacatggttgaatgatagcatttcactctgcgttctcctagatctgagcaagctgtcagttctcacccccaccgtgtatatacatgagctaacttttttaaattgtcacaaaagcgcatctccagattccagaccctgccgcatgacttttcctgaaggcttgcttttccctcgcctttcctgaaggtcgcattagagcgagtcacatggagcatcctaactttgcattttagtttttacagtgaactgaagctttaagtctcatccagcattctaatgccaggttgctgtagggtaacttttgaagtagatatattacctggttctgctatccttagtcataactctgcggtacaggtaattgagaatgtactacggtacttccctcccacaccatacgataaagcaagacattttataacgataccagagtcactatgtggtcctccctgaaataacgcattcgaaatccatgcagtgcagtatatttttctaagttttggaaagcaggttttttcctttaaaaaaattatagacacggttcactaaattgatttagtcagaattcctagactgaaagaacctaaacaaaaaaatattttaaagatataaatatatgctgtatatgttatgtaatttattttaggctataatacatttcctattttcgcattttcaataaaatgtctctaatacaatacggtgattgcttgtgtgctcaacatacctgcagttgaaacgtattgtatcaatgaacattgtaccttattggcagcagttttataaagtccgtcatttgcatttgaatgtaaggctcagtaaatgacagaactatttttcattatgggtaactggggaataaatgggtcactggagtaggaatagaagtgcaagctggaaaggcaaaaatgagaaagaaaaaggcaggccctttgtgtctaccgttttcagtgctgtgtgatcatattgttcctcacagcaaaaaagaatgcaagggcataatgttagctgtgaacatgccagggttgcattcacattcctgggtacccagtgctgatggggtgtgcccacgtggggacatgtccttggcgtgcttcctcagagtggcttttcctccattaatacatatatgagtactgaaaaattaagttgcatagctgctttgcagtggtttcagaggcagatctgagaagattaaaaaaaaatctcaaatgtatcagctttttttaaaggacattactagaaaattaaacagtattttttaacatgtgtgactttcatgcttctggggttggagcttaaagatccaaactgagaaagcaggccgggcatggtggctcatgcctgtaatcccaacactttgggaggccaaggagggtggatcacttaaggtcaggagtttgagaccagcctggccaacatggcgaaaccctgtctctactaaaaacataaaaattagctgggggtggtagcacatacctgtaatcccagctactcaggaggctgaggcaggagaatttgcttgatcctgggaggcagaggttgtagtgagccgagatcgcgccatcgcactccagcctgggtgacaagagcaaaactccatctc

SEQ ID NO: 154 - DNA, 5477 bp, Homo sapiens
agttattcttcatcctagcatttctgttcgactagcagcagcttggtgtttacactgcattgccgtggcattaccctcctacctaacaccactcttggatcgttgccttgaacggcttactggacataagtcttcacctgaagcagtgactggcttcagttttgctgtagcagctttgttgggagcagtaaaacattgtcctttaggaattcctcatggaaaaggcaagattattatgacattagcagaggatttgctgtgttctgctgctcaaaacagtcgcctttcagctcagcgcacacaagctggatggttgctgatttctgctctgatgacattaggtcctgcagttgttagccatcaccttgctcgagttctgctgttgtggaagtgtgtctttccagcatctcctaaagatctagaaacagaaaagagccgaggagattcgtttacatggcaggtgaccctggaaggacgagctggtgcactgtgtgctatcaagagctttgtttcccactgtggtgatcttcttactgaggaagtaactcagcgtcttcttccaccacttccttgtgctgtggatttgctaactcagctttcttcaatactaaaaatgtatggaagtcctttgaaaacaccgtcagtggtttatagacaaagactttatgaactgttgattttattacctcctgagacctatgaaggaaacctctgtgctatcctcagagagctggctgctgacttgactgcccctgatattcaggtggcagcatctacatttttacttccacccctctgtcatcaggatgatcttttgatactaagtcctttcctacaagagactgaccatagatttattgaagaacagctcctgcttggtaatggtgttgcttgcggaagtcttgaatatgacccttattcgatttatgagaaagatgtagagggagattcagtgcctaagcccttacctccagcactatcagttattagttctgcatccaagctctttggggttgtatgcgctcatgtgggagaaactcaaaggcttcttatactggaacagcttttggacagtataaagcacacaaaaggagctcgtcagcaagtggttcagttacatgttgtttcttcagtttctagtttcttgaagtacgtggctggctccaagggatgtttaggtccagaagaaatgaaaagatttgccttaacattagttatgggagccctagaaagccccaaccccttgctgagatgtgcagctgcagagtcatgggctagattagcccaaatggtagatgatggagcttttactgctggattagctcaagttagctttgacaaattgaaatcagcaagggatgtggttaccagaacaggacactcattggccttggggtccctacataggtatttaggaggaataagttcttctcaacacctaaattcttgtattggaatcctttatactttggcgcaggacagcacttctcctgatgtgcagacctgggcattacattctctatcattgatcattgattctgctggcccactctattatgtgcatgtggaacctaccctttctcttattataatgttgttgttaaatgtgcctcctactcatgctgaagttcaccaaagccttggtcgctgtttgaatgcccttattaccacgttaggtccagagctacaaggtaacagtacttcaatttctaccttaaggacttcctgtctactgggttgtgcagtaatgcaagataacccagactgccttgttcaagctcaggccatctcttgccttcagcagcttcatatgtttgctccacgacatgtcaacttgtctagcctggttagctgcctctgtgtgaatctttgtagcccctacttgttactgagaagagcagtactggcttgcttacgtcagcttgtacaaagagaagcagctgaagtttcagaacatgctgttatgcttgctaaggatagcagagaagagttgactccagatgctaacatcagagaagttggccttgagggggcattgttgatcttactagacaaggagacagatgagagattatgccatgatatcaaagagactttaaattatatgcttacatctatggcagtggaaaaactctccctgtggttaaagctttgtaaagatgtacttgctgcatcagctgattttacagctgtaacttgtgtggatacaatgcaagaagaagaaggagataaaggggatgatgcctcagtcctgaccaccagacgtgatgaaaaatcccatccttttaccaatccccgatgggctactagagtctttgctgctgaatgtgtctgtaggataattaaccaatgtgagaatgctaacagtgcacattttgacattgctttagcacaagaaatgaaaaaaagagattcaagaaatgactttttggtactgcatcttgctgacttaattcgcatggcttttatggctgccacagatcacagtgaccagctccgtctttctggccttgaaatgctgttagttgttattcggcgatttgcaactgttccagaaccagagtttccaggtcatgtgattctggaacagtatcaagccaatgtaggagcagcgcttagaccagccttcacttcagagacaccacctgatgtcactgccaaagcatgtcaggtttgcagtgcctggatagcaagtggagttgtaagtgaccttaatgatctccgaagagttcatcagttgcttgtttcatcgttaactaaaatacaggctggaaaagaagctctaagtcacttatataatgaaagtgcttctaccatggagatcttagctgtgcttaaagcctgggcagaggtctacataattgctgtgcaaagacataaaaaccacagacaacctttgaagactaccacctgtttagaagacggtatcagaaatggatcatgttcatcagatggactgcttgacttagtctatgcagatcttggcacactaagcagactctggcttgctgcacttcaggattttgctcttttaactttgccttcagaatttgcctcccaacttcctgctgaaggtggtgctttctacacagcagagactagtgaaaatgcaaaattgcattattacaactcctgggcacttatcctccatgctacagcattgtggcttacaagcacgggttttgttgttgctgacccagatgaaggagcatctaatctctccaggcctgtaacaccaacttccatgtgtcagggttcatcatctggggctaccataaagtcccctgaggatgtctacactgatagattccatcttattttaggaatcagcgtggaatttctatgttccttacgttcagatgcaaccatggaaagcataactgcttgtttacatgcattgcaagcacttctagatgtaccttggcccagatcaaaaattggcagtgatcaggacttgggtatagaattgctgaatgttctacatcgagtaattttaaccagagaatcaccttccattcagttggcttcacttgaagtggtaaggcagattatctgtgctgctcaagaacatgtgaaggaaaaaagacgaagtgcagaagttgatgatggggctgctgaaaaggaaactctgccagagtttggagagggaaaggacaccggaggacttgtgcctggaaagtctttggtctttgcaacactggaattgtgtgtatgcattctagttagacagctcccagaattaaaccctaaattgacaggtagcccaggagtaaaagctacgaagccacagatactattagaagatggaagtagattggtttcagctgcattggttatcctttccgaacttcctgcagtgtgctctcctgaaggaagcatctcaattctccctactatattgtacctcacaatcggggtcctcagagagactgctgtgaagttacctgggggccagttatcttcgacagttgcagcttccctacaggctttaaaaggaatattatcttctcccatggcccgggcagaaaagagccgtactgcttggactgaccttctccgaagtgccttaacaacaattcttgactgttgggatccagttgatgaaacacaccaagaacttgatgaagtcagtctacttactgctatcacagtgtttattttgtctaccagtccagaagtaactaccatcccatgccttcagaagcgctgtattgataaatttaaagctactcttgagataaaagatcctgtggtacaaatcaagacctaccagctcctacattccatctttcagtatccaaatccagctgtttcctacccatacatttactctttagcatcctgtatcatggaaaaactgcaggaaatagacaagagaaaacctgaaaacactgctgagcttgagatcttccaagaaggcataaaggtcttagaaacactggttactgttgctgaagaacaccatcgcgctcagctggtggcctgtcttttgcccatcctcatttccttccttttggatgaaaattctctgggatcagcaacttccataatgagaaatttacatgactttgctctacaaaatctcatgcaaattggacctcagtattcatctgtttttaaaagtttagtggcttcttctccagccctaaaagcccgccttgaggctgctataaagggcaatcaggaaagtgtcaaagtcaagataccaacatctaaatatactaagagtcctggaaaaaactcaagcatccaattaaagaccagtttcctctgattttttttttggaatagtaagcaccttaatataataaatacttgatcattgcctttggtgacaaaagggacattgtagacacaagtgcccttagaggtctagttgattgttttaccttaaatagctgtgactcttcaaagtaacagcatacttaacatttttgtgtgtgtgcgtggggtttgtgttttgttttgttttgtttttctatttaaaaagacaatggagctaacttgccaggaattttaagaaagtgctaaagaactaaacttactaaacaatccactgctttaaaaatgaaatgaatttcttctaacagtccatacatatgtggtatacttaatactgtgacagatataaatatgactctagtgtaaattatctgcactaatattgtatcccaattgctgatttaaaattctgctttggcccggcacagtggctcatccctgtaattccagcactttggaaggccaaggcgggcggatcacgaggtcgggagtttgagaccagcctgaccaacatggtgaaaccccgtctctactaaaaatacaaaaattagccgggtgtggtggcacacacctgtaatcccagctactcaggaggccgaggcaggaaaatcgcttgaacctggcaggcagaggttgcagtgagccaagattgtgccactgcactccagcctgggcgacagagtgagactccatct

SEQ ID NO: 155 - DNA, 5801 bp, Homo sapiens
caggcaaggcttatctggtgaaaacttttttgctatgctcagagggtaccgagtagaaaattatgacccaaaagggaccattgctttgtggtcataattttctactcggtaccctctgagcatagcaaattatgaccacaaagcaatggtcccttttgggttccctgaatttttccgctgtgaccctgcaatctctccgagccttcatgcagcagcacagatttctaggggagaatttgtccgcatctcaggattagattatgtggacagtgccctcctgatggggagagacagggacaagcctttcaaacggaggttgaaatcagagtcggtggaaacatctctcttccgaaagcttcgaactgttaaaagtgagcacgaaactttcaagttcacgtctgagctggaggagagccgactggagaggggcattcgcccttggaattgtcagcgatgttttgcacattatgatgtccagagcattttgtttaatatcaacgaagccatggctacgagggctaatgtggggaaaaggaaaaacataaccactggggcatctgcagcatcccagactcagatgcctacgggccagacaggcaactgtgagtcccctttagggagcaaggaggacctcaactccaaagagaacctggatgccgatgagggtgatgggaaaagtaacgacctcgtccttagttgtccttactttagaaatgagactggaggggaaggcgacaggcggattgcgctctctcgagccaactcatcctctttcagttctggggaaagctgctctttcgaatcgtcactcagctctcactgcacaaatgcaggtgtctccgtcttggaagtgcccagagaaaaccagcctattcacagggagaaagtgaagcgctacatcatagaacacattgaccttggggcctattattaccgcaaattcttctatgggaaagagcaccaaaactactttggaatagatgaaaaccttggtccagtagcagtcagcatccggagagagaaggtggaagatgccaaggagaaagaaggatcccagttcaactacagggtggctttcaggacaagtgagcttacaacactgagaggagcaattttagaagatgctataccctctactgctaggcatggtaccgcacgaggactacctctcaaagaagttttggaatacgtcattccagagctgagcattcagtgtttgcgacaggcttccaactcacccaaggtctcagagcagctgctcaagcttgatgaacaagggctgagctttcagcacaagatcgggatcctttattgcaaagcaggccagagcacagaggaagagatgtataacaatgagacggcgggaccagcttttgaagaattccttgatcttctgggccagagagtccgactgaaaggatttagtaaatatcgagctcagctagacaataagactgattccacgggcacgcactctctctataccacatacaaagactacgaactcatgttccacgtgtcaaccctgcttccctacatgcccaacaacagacaacagctactgaggaaaaggcacataggaaatgacatcgtcaccatcgtcttccaggagcctggggcacttccttttactccaaaaagcatccggtctcactttcagcatgtctttgtcatagtcaaagtgcataatccatgtaccgaaaatgtgtgttatagtgttggagtttccagatcaaaagatgtgccaccatttggcccaccgattcccaaaggtgtaacttttccaaagtcagccgtgttccgggacttccttttagccaaagtaatcaatgcagaaaatgcagcccataaatcagaaaagtttcgagcaatggccactcgaacgaggcaggagtacttgaaagatctggcggagaactttgtcacaaccgccaccgtggatacctctgtgaagttcagcttcattacgctgggtgcgaagaaaaaggagaaggtaaagccaaggaaggatgcccacttgtttagcattggggccatcatgtggcacgtgatagcccgggacttcggccagtctgctgacattgaatgtcttctcgggatctccaatgagttcatcatgttgattgaaaaggattccaagaatgttgtattcaactgttcctgcagggatgtgattgggtggacatctggattagtgagtatcaaagtgttttacgaaagaggagaatgtgtcctcctgtcctcggtagacaactgtgctgaagacatcagggaaattgttcagcgattagtaatagtgacgagaggctgcgagactgtggaaatgaccctgaggaggaacgggctgggccagcttggcttccatgtgaattttgaaggaattgtcgcagatgtggaaccttttggctttgcctggaaggctggccttcgccaagggagccgcctcgtggagatctgcaaagtagccgtggccactctgacccacgagcagatgatcgacctgctccgtacttctgtgactgtgaaggtggtcatcatccagccccatgatgacggctcgccccgaagagggtgttcagagctctgccggatccctatggtggaatataaactcgacagcgagggcaccccctgcgagtataaaacccccttcaggaggaacactacgtggcaccgggtgcccactcctgccctgcagcccctctctagagcttcccccatccccggcacgcccgaccggctgccgtgccaacagctgctccagcaggcccaggctgccattcctcgaagcacctccttcgaccggaagctgcccgatggcacgagaagctcacccagcaaccagtcatcctccagcgaccctggacccggcgggagcggaccctggagaccacaagtgggctacgacgggtgccagtcccctctactgctcgaacaccagggctcaggccctttggaatgtgacggagccagggagagggaagacaccatggaagcaagcaggcacccggaaaccaaatggcatggcccaccttccaaagtcctgggttcctataaagaaagagctctgcagaaagatggaagttgcaaagattcccccaataagctttctcacattggggataaaagttgctccagtcactccagcagcaacacgctctccagcaacacctccagcaacagtgacgacaagcactttgggtctggcgacctgatggaccccgaattactggggctgacctacatcaaaggggcctccaccgacagtggcatcgacacggccccctgcatgcctgccaccatcctcggccctgtgcacctggcaggcagcaggtccctgatccacagccgggccgagcagtgggctgatgctgccgacgtctctgggcctgacgacgagccagccaagttatattctgtgcatggctacgcgtccgccatctccgccggcagtgctgcggaaggcagcatgggcgatctcagtgagatatcctctcattccagtggttctcaccattcaggaagcccttcagctcactgttcaaaaagtagtgggtctctggattcatccaaagtctacatcgtgtctcacagcagcggacaacaggttcccgggtccatgtccaagccctaccacagacaaggggcagtgaacaaatatgtcatcggctggaagaaatcggagggcagcccaccgcccgaggagcctgaagtgactgaatgtcccgggatgtatagtgagatggatgtcatgtccacagcaactcagcatcagacagtggtgggagatgctgttgcagagactcaacatgttctgtctaaagaagattttctgaaattgatgcttcctgacagccccttagtggaggaggggcgaagaaagttttcgttctatgggaacctgtctccaaggaggtcgctttaccgcacgctgtctgacgagagcatctgcagcaacaggagggggtcctcctttggcagttcccggagttccgtgcttgaccaggccctgcccaacgacattctgttcagcaccaccccaccctaccacagcacgctgcctccgcgggcccaccccgcacccagcatggggagcctgagaaatgagttctggttctccgatgggtccttatcagataagtccaagtgcgcagatcctggcctgatgcccctcccggacacagccacagggttagattggacccacctcgtggatgctgcacgggcatttgaaggtcttgactcagatgaagaactggggctgctctgtcaccacacgtcctatctagaccagagggtggcatccttctgcaccctgacagatatgcagcatgggcaggacctggaaggggcccaagagctgcccttatgtgtagatccaggcagtggcaaagagttcatggacacaactggggagcgttctccatcaccactgaccgggaaagtcaatcagctggaattaattcttcgacaactccagaccgaccttcggaaggaaaaacaagacaaggccgttctccaagcagaagtgcagcacctgagacaggacaacatgagactgcaggaggagtcccagaccgcgacagctcagctgcggaaattcacagaatggtttttcaccaccatcgacaaaaaatcttagccaatccgcacctcatcaagggaccactgggaaatgccccttgtccctttgaagtcacaaacatgtggtttttctgtgtgctttcaaccaatcgtagatgtttttgctgttccattctgtgtagcaccattcaccacagcaggatagggagcctcgactctttctcggtaaccacggcagagagcagcgccgatgtgaagatgaatgaatgtaactcctggtgtgaagatgaatgtaaaccctggcgacagttgagacctttttcttttagactctgctaaaacagtgctctggcttgggcttacctcaagagggaagatagttgagttttatttcctgtatatcaggtgacctggtagagatgtaaagcaatttaccatagtttgggctttagtattgtaaaataaacatgagaacaaataatcagacatatactttaatgttaaaggtgctctatttttttggatgtacagtagttttatttccacagccacattaccatagcaataagaaaggaggcatagtacatagttggaaaagctttgtggggggattaaaaaaaaaaaaaagcactgttgtgtttaacactagttcagatgcagttaccttagagacttatttatttgcaggaacaaatggtgcctgaatattaacagtgttctgattaaaaacaaaaaaaagatacatatgccttgtaaatggctcaccgagtggtcagtagtcacttcaactcttagttcacttttgtatagttgctctgctggaaagaaatgagagtgaatctgcttactcactagaacttccctgtgtgctgtgagccagcggaaccacttgtacaatgccagatttgtttatctttgtacagaagctttgatgaagtgtcttgtatttaacacccttatttaagcttatttaaccttaaattgttaattttataaaatttggtttggcctgcactacgatgagggatggaggtagctgcaggctcagaagagactgagcttgcacagatcagaccgagaagcagggtgagagattctaacgactggatgctgctagtaacacattgtttgtattgctttaccatttttaactgttagatttgagatgaacatacattttgcttttttaataaatgtttaaaagaagtccacataag

SEQ ID NO: 156 - DNA, 3962 bp, Homo sapiens
aaaacatctatcttgctgtgtttggacaggccagcccctgaaacatcttgggcaatggagggttaacttctcaaagtttaataggcaagaccagcaaccatgcaacaaggacttcaactaaccaactaaagaactgttccccagagcattgttcctgagaaggaaaagagtccaaacacctacccacacctgctttgtgccaagaatccacagttggattgcaaggacagtgtatgttgtccttttggaaaaatgagagtgagcccaaatgaagaacaagcaaaggcgttcaagacccagctgttgagagtagaaaagcagaagaaaggacccgaggtcagcaagtgccctccccacaatggggcagatctgccagcgagaatcggctacagcagctgaaaaaccaaaacttcatctacttgctgaaagtgagcattgttgatgctcttgagagcatcagccaggacattaatgtgcaccactgtggtggcgtggaaagatggcaaaaagagccctgcgtgattttattgacaagtatctctatgccatgcggctctccgatgaaactctcatagatatcatgactcgcttcaggaaggagatgaagaatggcctctcccgggattttaatccaacagccacagtcaagatgttgccaacattcgtaaggtccattcctgatggctctgaaaagggagatttcattgccctggatcttggtgggtcttcctttcgaattctgcgggtgcaagtgaatcatgagaaaaaccagaatgttcacatggagtccgaggtttatgacaccccagagaacatcgtgcacggcagtggaagccagctttttgatcatgttgctgagtgcctgggagatttcatggagaaaaggaagatcaaggacaagaagttacctgtgggattcacgttttcttttccttgccaacaatccaaaatagatgaggccatcctgatcacctggacaaagcgatttaaagcgagcggagtggaaggagcagatgtggtcaaactgcttaacaaagccatcaaaaagcgaggggactatgatgccaacatcgtagctgtggtgaatgacacagtgggcaccatgatgacctgtggctatgacgaccagcactgtgaagtcggcctgatcatcggcactggcaccaatgcttgctacatggaggaactgaggcacattgatctggtggaaggagacgaggggaggatgtgtatcaatacagaatggggagcctttggagacgatggatcattagaagacatccggacagagtttgacagggagatagaccggggatccctcaaccctggaaaacagctgtttgagaagatggtcagtggcatgtacttgggagagctggttcgactgatcctagtcaagatggccaaggagggcctcttatttgaagggcggatcaccccggagctgctcacccgagggaagtttaacaccagtgatgtgtcagccatcgaaaagaataaggaaggcctccacaatgccaaagaaatcctgacccgcctgggagtggagccgtccgatgatgactgtgtctcagtccagcacgtttgcaccattgtctcatttcgctcagccaacttggtggctgccacactgggcgccatcttgaaccgcctgcgtgataacaagggcacacccaggctgcggaccacggttggtgtcgacggatctctttacaagacgcacccacagtattcccggcgtttccacaagactctaaggcgcttggtgccagactccgatgtgcgcttcctcctctcggagagtggcagcggcaagggggctgccatggtgacggcggtggcctaccgcttggccgagcagcaccggcagatagaggagaccctggctcatttccacctcaccaaagacatgctgctggaggtgaagaagaggatgcgggccgagatggagctggggctgaggaagcagacgcacaacaatgccgtggttaagatgctgccctccttcgtccggagaactcccgacgggaccgagaatggtgacttcttggccctggatcttggaggaaccaatttccgtgtgctgctggtgaaaatccgtagtgggaaaaagagaacggtggaaatgcacaacaagatctacgccattcctattgaaatcatgcagggcactggggaagagctgtttgatcacattgtctcctgcatctctgacttcttggactacatggggatcaaaggccccaggatgcctctgggcttcacgttctcatttccctgccagcagacgagtctggacgcgggaatcttgatcacgtggacaaagggttttaaggcaacagactgcgtgggccacgatgtagtcaccttactaagggatgcgataaaaaggagagaggaatttgacctggacgtggtggctgtggtcaacgacacagtgggcaccatgatgacctgtgcttatgaggagcccacctgtgaggttggactcattgttgggaccggcagcaatgcctgctacatggaggagatgaagaacgtggagatggtggagggggaccaggggcagatgtgcatcaacatggagtggggggcctttggggacaacgggtgtctggatgatatcaggacacactacgacagactggtggacgaatattccctaaatgctgggaaacaaaggtatgagaagatgatcagtggtatgtacctgggtgaaatcgtccgcaacatcttaatcgacttcaccaagaagggattcctcttccgagggcagatctctgagacgctgaagacccggggcatctttgagaccaagtttctctctcagatcgagagtgaccgattagcactgctccaggtccgggctatcctccagcagctaggtctgaatagcacctgcgatgacagtatcctcgtcaagacagtgtgcggggtggtgtccaggagggccgcacagctgtgtggcgcaggcatggctgcggttgtggataagatccgcgagaacagaggactggaccgtctgaatgtgactgtgggagtggacgggacactctacaagcttcatccacacttctccagaatcatgcaccagacggtgaaggaactgtcaccaaaatgtaacgtgtccttcctcctgtctgaggatggcagcggcaagggggccgccctcatcacggccgtgggcgtgcggttacgcacagaggcaagcagctaagagtccgggatccccagcctactgcctctccagcacttctctcttcaagcggcgaccccctaccctcccagcgagttgcgctgggagacgctggcgccagggcctgccggcgcggggaggaaagcaaaatccaactaatggtatatattgtagggtacagaatagagcgtgtgctgttgataatatctctcacccggatccctcctcacttgccctgccactttgcatggtttgattttgacctggtcccccacgtgtgaagtgtagtggcatccatttctaatgtatgcattcatccaacagagttatttattggctggagatggaaaatcacaccacctgacaggccttctgggcctccaaagcccatccttggggttccccctccctgtgtgaaatgtattatcaccagcagacactgccgggcctccctcccgggggcactgcctgaaggcgagtgtgggcatagcattagctgcttcctcccctcctggcacccactgtggcctggcatcgcatcgtggtgtgtcaatgccacaaaatcgtgtgtccgtggaaccagtcctagccgcgtgtgacagtcttgcattctgtttgtctcgtggggggaggtggacagtcctgcggaaatgtgtcttgtcttccatttggataaaaggaaccaaccaacaaacaatgccatcactggaatttcccaccgctttgtgagccgtgtcgtatgacctagtaaactttgtaccaattc

SEQ ID NO: 157 - DNA, 1294 bp, Homo sapiens
atgtgtgacgacgaggagaccaccgccctggtgtgcgacaacggctctgggctggtgaaggccggctttgcgggcgatgacgcgccccgcgctgtcttcccgtccatcgtgggccgcccgcggcaccagggagttatggtgggtatgggtcagaaggactcctacgtaggtgatgaagcccagagcaagagaggcatcctgaccctgaagtatcccatcgagcatggtatcatcaccaactgggacgacatggagaagatctggcaccacaccttctacaatgagctccgtgttgctcccgaggagcaccccaccctgctcacagaggccccgctgaaccccaaggccaaccgggagaagatgactcagatcatgtttgagaccttcaatgtccctgccatgtacgtggccatccaggcagtgctatccctgtatgcttctggccgtaccacaggcattgttctggactctggggatggtgtaactcacaatgtccccatctatgagggctacgctttgccccatgccatcatgcgtctggatctggctggtcgggacctcactgactacctcatgaagatcctcactgagcgtggctactcctttgtcaccactgctgaacgtgaaattgtccgtgacattaaagagaagctgtgctatgtcgccctggattttgagaatgagatggccacagctgcctcttcctcctccttggagaagagctatgaactgcctgatggccaagtcatcactatcggcaatgagcgcttccgctgtcctgagacactcttccagccctccttcattggtatggaatctgctggcatccatgaaacaacttacaatagcatcatgaagtgtgacattgatatccgcaaggacctgtatgccaacaatgtcttatctggaggcaccactatgtaccctggtattgctgatcgtatgcagaaggaaatcactgctctggctcctagcaccatgaagattaagattattgctccccctgagcgtaaatactctgtctggattgggggctccatcttggcctctctgtccaccttccagcaaatgtggattagcaagcaagagtacgatgaggcaggcccatccattgtccaccgcaaatgcttctaagatgccttctctctccatctaccttccagtcaggatgacggtattatgcttcttggagtctcccaaaccaccttccctcatctttcatcaatcattgtacagtttgtttacacacgtgcaatttgtttgtgcttctaatatttattgctttataaataaa

SEQ ID NO: 158 - DNA, 4093 bp, Homo sapiens
gggatcccgggagggagcggagcggacctgggcttggtcgcctccaagccggcgggaccgagtgctttaggccgctcgaaagaaagttgctccgacccgggaaaaggagaagatgaaggaagccaaggatgcccgctataccaatgggcacctcttcaccaccatttcagtttcaggcatgaccatgtgctatgcctgtaacaagagcatcacagccaaggaagccctcatctgcccaacctgcaatgtgactatccacaaccgctgtaaagacaccctcgccaactgtaccaaggtcaagcagaagcaacagaaagcggccctgctgaagaacaacaccgccttgcagtccgtttctcttcgaagtaagacaaccatccgggagcggccaagctcggccatctacccctccgacagcttccggcagtccctcctgggctcccgccgtggccgctcctccttgtctttagccaagagtgtttctaccaccaacattgctggacatttcaatgatgagtctcccctggggctgcgccggatcctctcacagtccacagactccctcaacatgcggaaccgaaccctatccgtggaatccctcattgacgaagaggtaatctacagtgagctgatgagtgactttgagatggatgagaaggactttgcagctgactcttggagtcttgctgtggacagcagcttcctgcagcagcataaaaaggaggtgatgaagcagcaagatgtcatctatgagctaatccagacagagctgcaccatgtgaggacactgaagatcatgacccgcctcttccgcacggggatgctggaagagctacacttggagccaggagtggtccagggcctgttcccctgcgtggacgagctcagtgacatccatacacgcttcctcagccagctattagaacgccgacgccaggccctgtgccctggcagcacccggaactttgtcatccatcgcttgggtgatctgctcatcagccagttctcaggtcctagtgcggagcagatgtgtaagacctactcggagttctgcagccgccacagcaaggccttaaagctctataaggagctgtacgcccgagacaaacgcttccagcaattcatccggaaagtgacccgccccgccgtgctcaagcggcacggggtacaggagtgcatcctgctggtgactcagcgcatcaccaagtacccgttactcatcagccgcatcctgcagcattcccacgggatcgaggaggagcgccaggacctgaccacagcactggggctagtgaaggagctgctgtccaatgtggacgagggtatttatcagctggagaaaggggcccgtctgcaggagatctacaaccgcatggaccctcgggcccaaaccccagtgcctggcaagggcccctttggccgagaggaacttctgaggcgcaaactcatccacgatggctgcctgctctggaagacagcgacggggcgcttcaaagatgtgctagtgctgctgatgacagatgtactggtgtttctccaggaaaaggaccagaagtacatctttcctaccctggacaagccttcagtggtatcgctgcagaatctaatcgtacgagacattgccaaccaggagaaagggatgtttctgatcagcgcagccccacctgagatgtacgaggtgcacacagcatcccgggatgaccggagcacctggatccgggtcattcagcagagcgtgcgcacatgcccatccagggaggacttccccctgattgagacagaggatgaggcttacctgcggcgaattaagatggagttgcagcagaaggaccgggcactggtggagctgctgcgagagaaggtcgggctgtttgctgagatgacccatttccaggccgaagaggatggtggcagtgggatggccctgcccaccctgcccaggggccttttccgctctgagtcccttgagtcccctcgtggcgagcggctgctgcaggatgccatccgtgaggtggagggtctgaaagacctgctggtggggccaggagtggaactgctcttgacaccccgagagccagccctgcccttggaaccagacagcggtggtaacacgagtcctggggtcactgccaatggtgaggccagaaccttcaatggctccattgaactctgcagagctgactcagactctagccagagggatcgaaatggaaatcagctgagatcaccgcaagaggaggcgttacagcgattggtcaatctctatggacttctacatggcctacaggcagctgtggcccagcaggacactctgatggaagcccggttccctgagggccctgagcggcgggagaagctgtgccgagccaactctcgggatggggaggctggcagggctggggctgcccctgtggcccctgaaaagcaggccacggaactggcattactgcagcggcaacatgcgctgctgcaggaggagctacggcgctgccggcggctaggtgaagaacgggcaaccgaagctggcagcctggaggcccggctccgggagagtgagcaggcccgggcactgctggagcgtgaggccgaagaggctcgaaggcagctggccgccctgggccagaccgagccactcccagctgaggccccctgggcccgcagacctgtggatcctcggcggcgcagcctccccgcaggcgatgccctgtacttgagtttcaaccccccacagcccagccgaggcactgaccgcctggatctacctgtcactactcgctctgtccatcgaaactttgaggaccgagagaggcaggaactggggagccccgaagagcggctgcaagacagcagtgaccctgacactggcagcgaggaggaaggtagcagccgtctgtctccgccccacagtccacgagactttaccagaatgcaggacatcccggaggagacggagagccgcgacggggaggctgtagcctccgagagctaagggggcccctcccccctgccccgtgccccactgaagaacattactgagggggctaaccttggggactccaatttgccaatgatgagggaacatttgaaagaactgcaaattgtccttgccagctcttgggatccttggatacctggggccatttaagaagctaggggaattaggccacaacaccccctgggacatccgaaagctacaccacagatgccagtggttcatgccttcttcccgcaactttaggaaaatttatttatttattgtttattagttatggggggagaggggagatttaaaggaccagggacatgggaaccaagccatagggatcagagggccttgtccttgaacactactggggtatattcaggctcatccacgcagctgctgggttcttgccctaacggccctcccctgcaacatccgtcttggaggagaggctgcagccacagcaccctactgccctttaaataaaggagggctgtgggcagggccatgtccctttctcctctcccctcaacctcttactgctgttctccctttctccgtccttcatggaagccctgggagataacctggcttcctggagttgatggaataaaggttggggtggccataatggtttgttgggggtgagggaaaaaacccacagggaccagaatgttttgttgttcttttgttttcttttttgtaccaaagtcaactgcacgtgttttatatttttaagagatcgtaggcaattagagatcgaagcctcctatctccacatctctgaagaagttgaggggtgggggagagaatgacttctgccttcatctgcagtaacggggggacctatactgacctcttccccagccatttagaaacaagttctagggtgggttggaaaatctccaagagccctgacctcatcttccacctcagcaaccatgacctgaaacctcagcgtgaatttgggggatttttcagtggaacccttgcccccaaatgtcgaccagcccccaaatgtcgaagaattttcttcttgccaattttgttgtttaaaaaaaaaattcagggaaaattaaaaacctggaactccaaaaaaaaaaaaaaaaa

SEQ ID NO: 159 - DNA, 3508 bp, Homo sapiens
gccacccagctgagaggagaggcgcccccggggacgcactgagattatgaggctctggcctccactggccactcactcgtgaccctttccaccacggcggagccttccaagcctacctcctgccgtgtggtgatctacctgcagcgggagatgtcgggggacacctgcctgtgcccagcctcaggggccaagcccaagctcagtggcttcaagggaggagggttgggcaacaagtatgtccagctcaacgtgggcggctctctgtactacaccactgtgcgggccctgacccgccacgacaccatgctcaaggccatgttcagtgggcgcatggaggtgctgaccgacaaagaaggctggatcctcatagaccgttgtggaaagcactttggcaccattttgaattacctccgagatgacaccatcaccctccctcagaaccggcaagaaatcaaggaattgatggctgaagcaaagtattacctcatccaggggctggtgaatatgtgccagagtgccctgcaggacaagaaggactcctaccagcctgtgtgcaacatccccatcatcacatccctaaaggaggaggagcggctcatcgaatcctccaccaagcccgtggtgaagctgctgtacaacagaagcaacaacaagtattcctacaccagcaactctgacgaccacctgctgaaaaacatcgagctgtttgacaagctctccctgcgcttcaacggccgcgtgctcttcatcaaggatgtcattggtgacgagatctgctgctggtccttttatggccagggccgtaagctggcagaggtgtgctgtacctccatcgtgtatgccacggagaagaagcagaccaaggtggaattcccagaggcccgaatctatgaggagacactcaacgtcctactctatgagactccccgcgtccccgacaactccttgttggaggccacaagccgtagccgcagccaggcttcccccagtgaagatgaggagacctttgaactgcgggaccgtgtccgccgcatccacgtcaagcgctacagcacttacgatgaccggcagctcggccaccagtctacccatcgcgactgaccagaccctcagggagtcagggcacgggaggccctatctcccatcctgtggaacccgccccattggccaccccatgctgctgctgcctgggtctctgctctagcacccagaggcatgacaggccctgctcagaggtcagagggtctgggcagaggagggaccacattcccctgccttgcccctgagcacttctggagactgcgtcctgtcctatctgctcaccatcacccttcctgcccgacggagctgcttctgctccctggggcatatggactgacccacctcctgctgagaaccttcccctaggccctgtgcagaaggctactgccccttaggcctcagctgggggaaaggcagttctggtgctgtagaggccctggtgcagaaagtgggacgtcttttttcctaaggtgtttaagcacaggcttgataagtttggtttttaaaaaataatctaggaaatgaataattctaaatctagtaatgaggaaactgagcatttcttttgccctccagggtgccaagaccctacatatgacagaacccttggcccttctccatgcctgtgggatctgtttctttaaagcactttgtactgttattcaggaggttgataatctccttgacccatgtctttctaccctaatccccacttccctgcagaatcaatctgagggaggggataaagaggaagcaataaaaaaaaaacatccgacagagcagctctggctttgcagcctggccagcagctcagagtgcaccgaggagggaaggatggctaagctgggaccggcagtcctcacagggtgcctgtgagaaaggacattttacccccacatcatagtcacatcactgactcctaggtctagcacgactgctctttgtgattctcttgagtacccttggcttccagccatgctgtcctcacatacggtaaagccaaagagctgtcacatgggccagaaacatgagccacggcaggaagaccgtggagcccgtgggcactgcatggtgttggctggcatgcccatcagctgaggacagcaaactcccagcagcccctacagaggtggcacatgcttggccacacatctactccctgcccacaccatctatgctcttggttggtgctggctgggatggcggttctgcccagtggtgtctctgagcgcgggatgacaggagcaaccgaagcaccctgaaggccttcactccttgttgggtaactcagccatggagatgccaagcactagccaggaggtgagttcctctttagggctttggttttcattcctttttgtttggcttggccaaaccagaattcagcttatctgaattattttccaaaggaatgctgtcagggagggactgttctgccagcctaacaaagcaacgtagccacgtatagtacccactttctgctctttggagagaacacaggttatcaagttcatctctcttgactactcttatgatagctgatgccacagagcctatgggcaaatgccagacccagggttagacacaaggacctgaagtgacatgacggcgggacaggggaaatgtgactttctaattaggcattttatgttagtcacagtcttgaatgtataaacagcactaagactctcaggtcaggtaccttggtgatcagctactagttcttccagccctcattgaggtaacaagataaagacaaatccacttctttggccaaattcaggctttggctttatgactttcccacagagactggaatgcgtcagcctgagaccactggcctattttctcagctgccctcttgaggtcctttaacactcaaattcccagctccccactgaggtgttgtgatgcttgccttttgacctccccatcccctttagtccctgcttactactttgacattcacatcctcagtgtctcagtcttttttgccgagaaagcacagtagtctgggactgggcatttatcttctctgactgaaaatctctccttggtcttaaggaaaatactaacattgaactcactgacatgatcttagcttctttaatcagactttgtgacttaaaagtttgggggttttctttgaaagtttccagccctattcagaaagcaactcttggctgtgtgcatttttcaactccaagcagcccaggggtaagtaaacaaagtatggatgaaggtcagattttcttgtcagtttctgagaaacctggcagcctgctgttaacaacacaggccagtattgggttttattgaatttggtatgtgaccaaggtcggcctaaaggatggcgcaggtcctgggcaggaaagaatttttcctttatcacataactgtaatatttggttgctcagcataagtgatggaagcaaacactaatttctaataaaattgtgttaaactc

SEQ ID NO: 160 - DNA, 3331 bp, Homo sapiens
gtgattactcactatagggctcgagcggccgcccgggcaggtctatggctgagcctgggcacagccaccatctctccgccagagtcaggggaagaactgagaggcgcataccccggctgtggcggctgctgctctgggctgggaccgccttccaggtgacccagggaacgggaccggagcttcatgcctgcaaagagtctgagtaccactatgagtacacggcgtgtgacagcacgggttccaggtggagggtcgccgtgccgcataccccgggcctgtgcaccagcctgcctgaccccgtcaagggcaccgagtgctccttctcctgcaacgccggggagtttctggatatgaaggaccagtcatgtaagccatgcgctgagggccgctactccctcggcacaggcattcggtttgatgagtgggatgagctgccccatggctttgccagcctctcagccaacatggagctggatgacagtgctgctgagtccaccgggaactgtacttcgtccaagtgggttccccggggcgactacatcgcctccaacacggacgaatgcacagccacactgatgtacgccgtcaacctgaagcaatctggcaccgttaacttcgaatactactatccagactccagcatcatctttgagtttttcgttcagaatgaccagtgccagcccaatgcagatgactccaggtggatgaagaccacagagaaaggatgggaattccacagtgtggagctaaatcgaggcaataatgtcctctattggagaaccacagccttctcagtatggaccaaagtacccaagcctgtgctggtgagaaacattgccataacaggggtggcctacacttcagaatgcttcccctgcaaacctggcacgtatgcagacaagcagggctcctctttctgcaaactttgcccagccaactcttattcaaataaaggagaaacttcttgccaccagtgtgaccctgacaaatactcagagaaaggatcttcttcctgtaacgtgcgcccagcttgcacagacaaagattatttctacacacacacggcctgcgatgccaacggagagacacaactcatgtacaaatgggccaagccgaaaatctgtagcgaggaccttgagggggcagtgaagctgcctgcctctggtgtgaagacccactgcccaccctgcaacccaggcttcttcaaaaccaacaacagcacctgccagccctgcccatatggtccctactccaatggctcagactgtacccgctgccctgcagggactgaacctgctgtgggatttgaatacaaatggtggaacacgctgcccacaaacatggaaacgaccgttctcagtgggatcaacttcgagtacaagggcatgacaggctgggaggtggctggtgatcacatttacacagctgctggagcctcagacaatgacttcatgattctcactctggttgtgccaggatttagacctccgcagtcggtgatggcagacacagagaataaagaggtggccagaatcacatttgtctttgagaccctctgttctgtgaactgtgagctctacttcatggtgggtgtgaattctaggaccaacactcctgtggagacgtggaaaggttccaaaggcaaacagtcctatacctacatcattgaggagaacactaccacgagcttcacctgggccttccagaggaccacttttcatgaggcaagcaggaagtacaccaatgacgttgccaagatctactccatcaatgtcaccaatgttatgaatggtgtggcctcctactgccgtccctgtgccctagaagcctctgatgtgggctcctcctgcacctcttgtcctgctggttactatattgaccgagattcaggaacctgccactcctgcccccctaacacaattctgaaagcccaccagccttatggtgtccaggcctgtgtgccctgtggtccagggaccaagaacaacaagatccactctctgtgctacaacgattgcaccttctcacgcaacactccaaccaggactttcaactacaacttctccgctttggcaaacaccgtcactcttgctggagggccaagcttcacttccaaagggttgaaatacttccatcactttaccctcagtctctgtggaaaccagggtaggaaaatgtctgtgtgcaccgacaatgtcactgacctccggattcctgagggtgagtcagggttctccaaatctatcacagcctacgtctgccaggcagtcatcatccccccagaggtgacaggctacaaggccggggtttcctcacagcctgtcagccttgctgatcgacttattggggtgacaacagatatgactctggatggaatcacctccccagctgaacttttccacctggagtccttgggaataccggacgtgatcttcttttataggtccaatgatgtgacccagtcctgcagttctgggagatcaaccaccatccgcgtcaggtgcagtccacagaaaactgtccctggaagtttgctgctgccaggaacgtgctcagatgggacctgtgatggctgcaacttccacttcctgtgggagagcgcggctgcttgcccgctctgctcagtggctgactaccatgctatcgtcagcagctgtgtggctgggatccagaagactacttacgtgtggcgagaacccaagctatgctctggtggcatttctctgcctgagcagagagtcaccatctgcaaaaccatagatttctggctgaaagtgggcatctctgcaggcacctgtactgccatcctgctcaccgtcttgacctgctacttttggaaaaagaatcaaaaactagagtacaagtactccaagctggtgatgaatgctactctcaaggactgtgacctgccagcagctgacagctgcgccatcatggaaggcgaggatgtagaggacgacctcatctttaccagcaagaagtcactctttgggaagatcaaatcatttacctccaagaggactcctgatggatttgactcagtgccgctgaagacatcctcaggaggccccgacatggacctgtgagaggcactgcctgcctcacctgcctcctcaccttgcatagcacctttgcaagcctgcggcgatttgggtgccagcatcctgcaacacccactgctggaaatctcttcattgtggccttatcagatgtttgaatttcagatctttttttatagagtacccaaaccctcctttctgcttgcctcaaacctgccaaatatacccacactttgtttgtaaaaaaaaaaaaaaaaaaaaaaaaaaaaaaa

SEQ ID NO: 161 - DNA, 2039 bp, Homo sapiens
ccaggggcgcacgggttgggaggcgccaggcggcccgccctccttgcacgggccggcccagcttccccgcccctggcgtccgctccctcccgctcgcagcttacttaacctggcccgggcggcggaggcgctctcacttccctggagccgcccgcttgcccgtcggtcgctagctcgctcggtgcgcgtcgtcccgctccatggcgctcttcgtgcggctgctggctctcgccctggctctggccctgggccccgccgcgaccctggcgggtcccgccaagtcgccctaccagctggtgctgcagcacagcaggctccggggccgccagcacggccccaacgtgtgtgctgtgcagaaggttattggcactaataggaagtacttcaccaactgcaagcagtggtaccaaaggaaaatctgtggcaaatcaacagtcatcatctacgagtgctgtcctggatatgaaaaggtccctggggagaagggctgtccagcagccctaccactctcaaacctttacgagaccctgggagtcgttggatccaccaccactcagctgtacacggaccgcacggagaagctgaggcctgagatggaggggcccggcagcttcaccatcttcgcccctagcaacgaggcctgggcctccttgccagctgaagtgctggactccctggtcagcaatgtcaacattgagctgctcaatgccctccgctaccatatggtgggcaggcgagtcctgactgatgagctgaaacacggcatgaccctcacctctatgtaccagaattccaacatccagatccaccactatcctaatgggattgtaactgtgaactgtgcccggctgctgaaagccgaccaccatgcaaccaacggggtggtgcacctcatcgataaggtcatctccaccatcaccaacaacatccagcagatcattgagatcgaggacacctttgagacccttcgggctgctgtggctgcatcagggctcaacacgatgcttgaaggtaacggccagtacacgcttttggccccgaccaatgaggccttcgagaagatccctagtgagactttgaaccgtatcctgggcgacccagaagccctgagagacctgctgaacaaccacatcttgaagtcagctatgtgtgctgaagccatcgttgcggggctgtctgtagagaccctggagggcacgacactggaggtgggctgcagcggggacatgctcactatcaacgggaaggcgatcatctccaataaagacatcctagccaccaacggggtgatccactacattgatgagctactcatcccagactcagccaagacactatttgaattggctgcagagtctgatgtgtccacagccattgaccttttcagacaagccggcctcggcaatcatctctctggaagtgagcggttgaccctcctggctcccctgaattctgtattcaaagatggaacccctccaattgatgcccatacaaggaatttgcttcggaaccacataattaaagaccagctggcctctaagtatctgtaccatggacagaccctggaaactctgggcggcaaaaaactgagagtttttgtttatcgtaatagcctctgcattgagaacagctgcatcgcggcccacggcaagagggggaggtacgggaccctgttcacgatggaccgggtgctgacccccccaatggggactgtcatggatgtcctgaagggagacaatcgctttaggtaattagttccatccccgggtggagcttctgcccagtggtcatgctggagtgggatgtggggccccagctatttgtcaagctttcttctaccttggggattcaattaacactagcagtgcactgctgcgaccttccagacttgggatggggaaaaggcaagggtcgccttgaaagcttacattgggaagaagggttacttctaagagtgtaatcttcacatgcatgggaagcagggaggggggactacatttttatgactgaagtgcaaggaaaacatcaccctctcattg

SEQ ID NO: 162 - DNA, 881 bp, Homo sapiens
tctagtctgtttgttttccttgtgtgtgttttctgttttcgggttggtctttttgtttgctttttctcttttttccccctgtgtggttgcctttgtcttttttctcttttgtgtcgtgttctttgtttttgtttgtgttagaccctcatcaatagatggagacatacagaaatagtcaaaccacatctacaaaatgccagtatcaggcggcggcttcgaagccaaagtgatgtttggatgtaaagtgaaatattagttggcggatgaagcagatagtgaggaaagttgagccaataatgacgtgaagtccgtggaagcctgtggtacaaaaaatgttgagccgtagatgccgtcggaaatggtgaagggagactcgaagtactctgaggcttgtaggagggtaaaatagagacccagtaaaattgtaataagcagtgcttgaattatttggtttcggttgttttctattagactatggtgagctcaggtgattgatactcctgatgcgagtaatacggatgtgtttaggagtgggacttctaggggatttagcggggtgatgcctgttgggggccagtgccctcctaattggggggtaggggctaggctggagtggtaaaaggctcagaaaaatcctgcgaagaaaaaaacttctgaggtaataaataggattatcccgtatcgaaggcctttttggacaggtggtgtgtgggtggccttggtatgtgctttctcgtgttacatcgcgccatcattggtatatggttagtgtgttggttagtaggcctagtatgaggagcgttatggagtggagtgaaatcacatggctaggccggaggtcattaggagggctgagagggctcctgttacggggtcatggg

SEQ ID NO: 163 - DNA, 1620 bp, Homo sapiens
tgggtcagtgtcacctccaggatacagacagccccccttcagcccagcccagccaggtctcctacaccgccaccatgccattcggtaacacccacaacaagttcaagctgaattacaagcctgaggaggagtaccccgacctcagcaaacataacaaccacatggccaaggtactgacccttgaactctacaagaagctgcgggacaaggagactccatctggcttcactgtagacgatgtcatccagacaggagtggacaacccaggtcaccccttcatcatgaccgtgggctgcgtggctggtgatgaggagtcctacgaagttttcaaggaactctttgaccccatcatctcggatcgccacgggggctacaaacccactgacaagcacaagactgacctcaaccatgaaaacctcaagggtggagacgacctggaccctaactacgtgctcagcagccgcgtccgcactggccgcagcatcaagggctacacgttgcccccacactgctcccgtggcgagcgccgggcggtggagaagctctctgtggaagctctcaacagcctgacgggcgagttcaaagggaagtactaccctctgaagagcatgacggagaaggagcagcagcagctcatcgatgaccacttcctgttcgacaagcccgtgtccccgctgctgctggcctcaggcatggcccgcgactggcccgacgcccgtggcatctggcacaatgacaacaagagcttcctggtgtgggtgaacgaggaggatcacctccgggtcatctccatggagaaggggggcaacatgaaggaggttttccgccgcttctgcgtagggctgcagaagattgaggagatctttaagaaagctggccaccccttcatgtggaaccagcacctgggctacgtgctcacctgcccatccaacctgggcactgggctgcgtggaggcgtgcatgtgaagctggcgcacctgagcaagcaccccaagttcgaggagatcctcacccgcctgcgtctgcagaagaggggtacaggtggcgtggacacagctgccgtgggctcagtatttgacgtgtccaacgctgatcggctgggctcgtccgaagtagaacaggtgcagctggtggtggatggtgtgaagctcatggtggaaatggagaagaagttggagaaaggccagtccattgacgacatgatccccgcccagaagtaggcgcctgcccacctgccaccgactgctggaacccagccagtgggagggcctggcccaccagagtcctgctccctcactcctcgccccgccccctgtcccagagtcccacctgggggctctctccacccttctcagagttccagtttcaaccagagttccaaccaatgggctccatcctctggattctggccaatgaaatatctccctggcagggtcctcttcttttcccagagctccaccccaaccaggagctctagttaatggagagctcccagcacactcggagcttgtgctttgtctccacgcaaagcgataaataaaagcattggtggccttaaaaaaaaaaaaaaaaaaaaaaaaaaaaaaaaaaaaaaaaaaaaaaaaaaaaaaaaaaaaaaaa

SEQ ID NO: 164 - DNA, 1725 bp, Homo sapiens
cctcaaaagaagaagaaatgtgtcatatatcaatttggggatataagcaaatcctagtcacagtcgttttctaaaaagtattgttttctggaaaaacctagtttttaagaatgatgccacagcgaagttctattttaactttttaatttgatttttttttctttgttacagaagaagacaatgatgaaattaaggattggggacctcatgtaagaatgggaggggtgttccaaaggacataccaggggtctaggaggagtctaggaaggaagtcctgtgttatatcattctgggagtacctattttccatgaggggatgaaatactggagctgttgtagaagaaaaacttctgattttaatacattcttagcccaagagggctgtacaaaagggaaacacatgtggactaaaaaagatgctgggaaaaaagttgttccatgtagacatgactggcatcagactggaggtgaagttaccatttcagtatatgctaaaaactcacttccagaacttagccgagtagaagcaaatagcacattgttaaatgtgcatattgtatttgaaggagagaaggaatttgatcaaaatgtgaaattatggggtgtgattgatgtaaagcgaagttatgtaactatgactgcaacaaagattgaaatcactatgagaaaagctgaaccgatgcagtgggcaagccttgaactgcctgcagctaaaaagcaggaaaaacaaaaagatgacacaacagattgagtgggagatggaaggaaggctattacattatttccgaatttttaatactgtgtgaagtggtggcttgctgcgtgtaatcttttgttttgttgttgtgttactgaatgtggcatttcagggttaacattaggttcttaaaagccaaagtcagtttgtctttttgtgcctctcatctttcttttgtgttatgtaagattgattattcatttctccctactggtaggaaccatagttgtgtcctatacttgaagaggctggaaagtagcccataaccataattgcagtatttctttgtatttctctgttaagcaaagaaatattaaggaacattttttttatgtttttgtattattccataattagtaaagcaagatgaaatgtcaaattttaatcagttttttcatgggatttgtgttcttacagtacttgaaaatatttaaggaagagatgaagctctgcagttttttctatgtgggatgattacttttttaaggaggattaattctgaggtagtatagtaactaaaggggaatatatgaattgtttaacaaattagaatttgtttacaactacttgaatttttaaattatgtcaaaacttacattacttgccaagcagtatgatgttataggaaacataaataagattacagaggtatcaatttggttaaaattcaccattttataagactaagcaataatcttaacaacctctttcctgaatatttaaatgtgtttgtatggtgttatgactaattgttactgatttagagactaagccctcttaaaacctttagttaaatataaaaagaaattatatatatcttgcctccctgatggaaaactatataaaattgtagacttaaaaggtttgtggaaatacattaggatatcagaaaactaaatatatggagttgctttatgactattacatgttaaataaaaatagcttaattgttttggaaaaaaaaaaaa

SEQ ID NO: 165 - DNA, 2878 bp, Homo sapiens
cagcgagcgccgtcgtctgcccgggcccgcccatcggggtccccaaccccatccggaccccgccgcccgagcgcgcggccccggaagcacccgcctcccggcatggtgctcaaggccttcttccccacgtgctgcgtctcgacggacagcgggctgctggtgggacggtgggtgccggagcagagcagcgccgtggtcctggcggtcctgcactttcccttcatccccatccaggtcaagcagctcctggcccaggtgcggcaggccagccaggtgggcgtggccgtgctgggcacctggtgccactgccggcaggagcccgaggagagcctgggccgcttcctggagagcctgggtgctgtcttcccccatgagccctggctgcggctgtgccgggagagaggcggcacgttctggagctgcgaggccacccaccggcaagcgcccactgcccccggtgcccctggtgaggaccaggtcatgctcatcttctatgaccagcgccaggtgttgctgtcacagctacacctgcccaccgtcctgcccgaccgccaggctggagccaccactgccagcacggggggcctggctgccgtcttcgacacggtagcacgcagtgaggtgctcttccgcagtgaccgctttgatgagggccccgtgcggctgagccactggcagtcggagggcgtggaggccagcatcctcgcggagctggccaggcgagcctcgggacccatttgcctgctgttggccagcctgctgtcgctggtctcagctgtcagtgcctgccgagtgttcaagctctggcccctgtccttcctcgggagcaaactctccacgtgcgaacagctccggcaccggctggagcacctcacgctaatcttcagtacacggaaggcggagaaccctgcccagctgatgaggaaggccaacacggtggcctctgtgctgctggacgtggccctgggcctcatgctgctgtcctggctccacgggagaagccgcatcgggcatctggccgacgccctcgttcctgtggctgaccacgtggccgaggagctccagcatctgctgcagtggctgatgggtgctcccgccgggctcaagatgaaccgtgcactggaccaggtgctgggccgcttcttcctctaccacatccacctgtggatcagctacatccacctcatgtcccccttcgtggagcacatcctttggcacgtgggcctctcggcctgcctgggcctgacggtggccctgtccctcctctcggacattatcgccctcctcaccttccacatctactgcttttacgtctatggagccaggctgtactgcctgaagatccatggcctgtcctcactgtggcgtctgttccgggggaagaagtggaacgttctgcgccagcgcgtggactcctgttcctatgacctggaccagctgttcatcgggactctgctcttcaccatcctgctcttcctcctgcctaccacagccctgtactacctggtgttcaccctgctccggctcctggtggtcgccgtgcagggcctgatccatctgctcgtggacctcatcaactccctgccgctgtactcactgggtcttcggctctgccggccctacaggctggcggataaacccactgccctacagccgcgtggtgcacacctaccgcctccccagctgtggctgccaccccaagcactcctggggcgccctgtgccgcaagctgttccttggggagctcatctacccctggaggcagagaggggacaagcaggactgagggaactgctggctcgcctggcaccaccacacggccacagccagccatctgctctgccagggtggcaccagctcagctggcgcatgtcctgtgctttgtggacgctgctgtgtgctcctgaacacggcaggccctgctatcacaccttgggcttggaggtcattgggagtgagcagatgtgggggtggccagccaggctggccgcactccatcactggcactgcctgccttgggacccgcttcccacctgctgcggtcaccatggtggcgagcacagcaaccccaggtgtccagagcactgccccatgcccaccctgtgtacccaggtccagagggtccgtccaccacagcagccccaggtggagggctggtctccctgggggctccccagtggctctgccctggctgtgggggtggagggaccttgccaggatgaaccccccagtcccaggcaccctctagctccctcagccgaacagcaccctgcatctgggggattgaagcagtcgctgacccccgtccccagcgggcccgggccctcactccctgaaccacacggggtttatttgcggatgttccctggagaggtcgctttgtgaagaaaccatcagcaggctgtgagcatcgccaggctgctgtgggggcgggagcagcctcagtgtcaagggcccgcccactgacccagccgtacctattcgtccacggtgccccgtagcagcaggtcctgcggccaaatctgtctcccttcatgggcctcccagggaaggaggaagccctgctgtgcagacacctctgtggccccccaggagtgtgagtggcctggggagggggccgtggcactgaggccgaaagtgcctgccagacggcacggtctgggtgcgggtgttccctgtgagcccgagtccgcttcaggaggggagcctgcaggtgccggctggtgaggggatgacgcgctgtgggtgggaggaggcagcgcccatctcagcagcaccaggactgcctgggactccctggcaacccagcaccggggaagccgtcagctgctgtgacaataaaacctgccccgtgtctggaaaaaaaaaaaaaaaaaaa

SEQ ID NO: 166 - DNA, 2106 bp, Homo sapiens
gtatacgaaatcataaaatctcatagatgtatcctgagtagggcggggcccgtgaaaccctctgaatctgcggccaccacccggtaaggctaaatactaatcagacaccgatagtgaactagtaccgtgagggaaaggtgaaaagaacccgagaggggagtgaaatagattctgaaaccatttacttacaagtggtccatttacttacaagtgtcagagcacgttaaagtgtgatggcgtacatcttgcagtatgggccggcgagttatgttaatatgcaaggttaagcagaaaaaagcggagccgtagggaaaccgagtctgaatagggcgactttagtatattggcatatacccgaaatcaggtgatctatccatgagcaggttgaagcttaggtaaaactaagtggaggaccgaaccgtagtacgctaaaaagtgcccggatggacttgtggatagtggtgaaattccaatcgaacctggagatagctggttctcttcgaaatagctttagggctagcgtatagtattgtttaatgggggtagagcactgaatgtggaatggcggcatctagctgtactgactataatcaaactccgaataccattaaaattaagctatgcagtcggaacgtggtatcaccattgatatctccttgtggaaatttgagaccagcaagtactatgtgactatcattgatgccccaggacacagagactttatccaaaacatgattacagggacctctcaggctgactgtgctgtcctgattgttgctgctggtgttggtgaatttgaagctggtatctccaagaatgggcagacccgagagcatgcccttctggcttacacactgggtgtgaaacaactaattgtcggtgttaacaaaatggattccactgagccaccctacagccagaagagatatgaggaaattgttaaggaagtcagcacttacattaagaaaattggctacaaccccgacacagtagcatttgtgccaatttctggttggaatggtgacaacatgctggagccaagtgctaacatgccttggttcaagggatggaaagtcacccgtaaggatggcaatgccagtggaaccacgctgcttgaggctctggactgcatcctaccaccaactcgtccaactgacaagcccttgggcctgcctctccaggatgtctacaaaattggtggtattggtactgttcctgttggccgagtggagactggtgttctcaaacccggtatggtggtcacctttggtccagtcaacgttacaacggaagtaaaatctgtcgaaatgcaccatgaagctttgggtgaagctcttcctggggacaatgtgggcttcaatgtcaagaatgtgtctgtcaaggatgttcgtcgtggcaacgttgctggtgacagcaaaaatgacccaccaatggaagcagctggcttccctgctcaggtgattatcctgaaccatccaggccaaataagcgccggctatgcccctgtattggattgccacacggctcacattgcatgcaagtttgctgagctgaaggaaaagattgatcgccgttctggtaaaaagctggaagatggccctaaattcttgaagtctggtgatgctgccattgttgatatggttcctggcaagcccatgtgtgttgagagcttctcagactatccacctttgggctgctttgctgttcgtgatatgagacagacagttgcggtgggtgtcatcaaagcagtggacaagaaggctgctggagctggcaaggtcaccaagtctgcccagaaagctcagaaggctaaatgaatattatccctaatcctcccaccccactcttaatcagtggtggaagaccggtctcagaactgtttgtttcaattgccatttaagtttagtagtaaaagactggttaatgataacaatgcatcgtaaaacctttcagaaggaaaggagaatgttttgtggacacgttggttttcttttttgcgtgtggcagttttagttattagtttttaaaatcagtactttttaatggaaacaacttgacccccaaatttgtcacagaattttgggacccattaaaaggttaactggg

SEQ ID NO: 167 - DNA, 2978 bp, Homo sapiens
  misc_feature (2384)..(2384): Wherein n may be a, c, g or t
ggaggccctgctgaggactccggcaagtgtgggtcgcggcgacggcggggctaaggccctgggtccgcgcgcggtttgaccacggccggggccttgggcatttcctggccttcctgttgagccgtgtaaacgcggggtgatgacggcgccgacctcttggcactgttgtgagagcgaagtgggcgcgagagcagacgccagctacagtttttttgggttatgtcgtcatgaagccggcgctttcagttgtgcaaccttgaacaaatgggacactgcccatctctaagataagaacctggaaaggggactctgttggccattggaaattgcagaataatgtctcaggtgacatttagtgatgtggctatagacttctctcatgaagagtgggcatgcctagattctgctcagagggacttatacaaggatgtgatggtccagaattatgagaacctggtctctgtaggtctttccgtaactaagccatatgtgatcatgttattggaggatggaaaagagccctggatgatggagaaaaaactgtcaaaagcttacccatttcctttatcacactctgttcctgcttctgtgaactttggattctctgctctatttgagcattgttcagaagtcactgaaatatttgagttgtcagaactatgtgttttctgggtgcttcatttcttatccaattctcctaattccactgtagaagctttttcaagaagtaaaaaaaaaaaaaaaaaaaaaaaaaaaaggcagtgctttgctttcttgatatatttcagattgggaatcaagatgggaaaacaaggaattatcaacaaagaaggatatttatatgaagattcaccccaaccagtaacaatggaaaaagttgtaaaacaaagttatgaattttcaaattctaataagaatttggaatatacagaatgcgacacatttagaagcacctttcattcaaagtctactctttctgaaccacaaaacaattctgctgaagggaattcacacaaatatgatatattaaagaagaatttatcaaaaaagtcagttataaaaagtgagagaataaatggtggaaagaaacttttaaattctaataaaagtggggcagccttcaaccagagcaaatctcttacccttccccagacttgtaatagagagaaaatctatacatgcagtgaatgtgggaaagcctttggcaaacagtcaatcctcagtcgccactggagaattcatacaggagagaagccctatgaatgtcgtgaatgtgggaagacttttagccatggttcatcccttacacgacatcagataagccatagtggagagaaaccttacaaatgcattgaatgtgggaaggcctttagccatggctcatcacttactaaccatcagagcactcacacgggagagaaaccgtatgaatgtatgaactgtggaaagtcttttagtcgtgtgtcccttctcattcagcatctaagaattcatacgcaagaaaaacgctatgagtgtcgtatatgtggaaaggccttcattcatagttcgtctctcattcaccatcagaaaagccatactggagagaagccttatgaatgtagagaatgtgggaaagctttctgctgtagctcacaccttactcaacatcaaagaattcacagtatgaagaaaaaatatgaatgcaacaaatgtctcaaggtctttagtagcttctcatttcttgttcaacatcagagtattcatactgaagaaaaaccgtttgaagtttagaaatgcaggaaatccttcaaccagcttgaatcactgaatatgcatttgagaaatcacattagattgaaaccctacgaatgcagtatatgtgggaaagcctttagtcataggtcgtccctgcttcaacatcacagtattcatactggagagaaaccttacgaatgtattaaatgtgggaagaccttcagctgtagttcaaaccttactgtacatcagagaattcatactggagaaaagccatataaatgtagtgagtgtgggaaagcttttagcaaaggctcgaatcttactgcccatcaaagagtacataatggagagaaacccaatagtgtggtaagtgtggaaaagcctttagatcatatgaatccctatacatgtgagaaatcttacagaagagaagcagtgtttatcacggtaaacttcattcatagatcctcccttatttaacatcagaaaaatgtatactggggaaaagttgtatgaaggtggtgaacatgggagacttttagcaatgatgcagatttttttattagagtttatactgtagagaaatcatatgaagtcaataaatgtgggaaagcctttgtcagtattaatcccttaattgaccntaagtatactcacactaggaaaaatctgtgtacatgtagcaaatgtgggaaagactataggcaataggaatctcctgcaaactcctacaggagaaaagttgtatgaatgtggaaactttagaaattgaaggaatttttccagttccaagtgcatcccttattctataggaaataaactggagacaaatctcatttaagagatgcagcaaagtgttcactaagagtgtttatcttgccagacataagaagatgaatggtagagcaacctgaaggatttagaaattacatataaatctttgcagttatgctatttgtaaacaggattatataggagagcaaataaacataagtatgcatttcttagagcagtagcttgcagtttcagttgagttctacttagaaattctttttagctagtgggcatgtgaagatatttagtcacccagaggagccagtaaatgttataatgttaaaaattaaagctgcaaaagaaataaaatggtgttaataaaaattttggcatctaataaaatcattttgtatatcaaaaaaaaaaaaaaaaaaaaaaaaaaaaaaaaaaaaaaaaaaaaaaaa

SEQ ID NO: 168 - DNA, 1936 bp, Homo sapiens
ccgaggcagcgggcagacgagcagggggcgggcggacatcttgggatccggagagtggccgggccggcagagcagggggccgaggacaccaggtctgttctcagagcgatgggccgcggagactgatctgccgccatgattggaggcttattcatctataatcacaagggggaggtgctcatctcccgagtctaccgagatgacatcgggaggaacgcagtggatgcctttcgggtcaatgttatccatgcccggcagcaggtgcgcagccccgtcaccaacattgctcgcaccagcttcttccacgttaagcggtccaacatttggctggcagcagtcaccaagcagaatgtcaacgctgccatggtcttcgaattcctctataagatgtgtgacgtgatggctgcctactttggcaagatcagcgaggaaaacatcaagaacaattttgtgctcatatatgagctgctggatgagattctagactttggctacccacagaattccgagacaggcgcgctgaaaaccttcatcacgcagcagggcatcaagagtcagcatcagacaaaagaagagcagtcacagatcaccagccaggtaactgggcagattggctggcggcgagagggtatcaagtatcgtcggaatgagctcttcctggatgtgctggagagtgtgaacctgctcatgtccccacaagggcaggtgctgagtgcccatgtgtcgggccgggtggtgatgaagagctacctgagtggcatgcctgaatgcaagtttgggatgaatgacaagattgttattgaaaagcagggcaaaggcacagctgatgaaacaagcaagagcgggaagcaatcaattgccattgatgactgcaccttccaccagtgtgtgcgactcagcaagtttgactctgaacgcagcatcagctttatcccgccagatggagagtttgagcttatgaggtatcgcacaaccaaggacatcatccttcccttccgggtgatcccgctagtgcgagaagtgggacgcaccaaactggaggtcaaggtggtcatcaagtccaactttaaaccctcactgctggctcagaagatcgaggtgaggatcccaaccccactgaacacaagcggggtgcaggtgatctgcatgaaggggaaggccaagtacaaggccagcgagaatgccatcgtgtggaagatcaagcgcatggcaggcatgaaggaatcgcagatcagcgcagagattgagcttctgcctaccaacgacaagaagaaatgggctcgaccccccatttccatgaactttgaggtgccattcgcgccctctggcctcaaggtgcgctacttgaaggtgtttgaaccgaagctgaactacagcgaccatgatgtcatcaaatgggtgcgctacattggccgcagtggcatttatgaaactcgctgctagctgccactaggcagctagcccacctccccagccaccctcctccacaggtccaggtgccgctccctcccccaccacacatcagtgtctcctccctcctgctttgctgccttccctttgcaccagcccgagtctaggtctgggccaagcacattacaagtgggaccggtggagcagcccctgggctccctgggcaggggagttctgaggctcctgctctcccatccacctgtctgtcctggcctaatgccaggctctgagttctgtgaccaaagccaggtgggttccctttccttcccacccctgtggccacagctctggagtgggagggttggttgcccctcacctcagagctcccccaaaggccagtaatggatccccggcctcagtccctactctgctttgggatagtgtgagcttcattttgtacacgtgtgacttcgtccagttacaaacccaataaactctgtagagtggaaaaaaaaaaaaaaaaaaa

SEQ ID NO: 169 - DNA, 2216 bp, Homo sapiens
tttccgcagttaggggctgctatttcaacgcagggagataaaaagaaaaaaacacttgctcttctaccccgctaaaaacactcatcctagggagcacgccagcatttgcagcgttcggggcagggccactcggcctgcggccgttgcactggctggaagctggcaggcgatcacggttgattggctcgggtgcggtccaagggcagcaacgccttcggcgggccgcctagggtgattggctgctgcagcccaccccctagccggtttggtgggcggcgaagcctggattggtggagctaagagctggctcagtttcagcgctggctcttcgtgcatggcagagatggcgactgcgactcggctgctggggtggcgtgtggcgagctggaggctgcggccgccgcttgccggcttcgtttcccagcgggcccactcgcttttgcccgtggacgatgcaatcaatgggctaagcgaggagcagaggcagcttcgtcagaccatggctaagttccttcaggagcacctggcccccaaggcccaggagatcgatcgcagcaatgagttcaagaacctgcgagaattttggaagcagctggggaacctgggcgtattgggcatcacagcccctgttcagtatggcggctccggcctgggctacctggagcatgtgctggtgatggaggagatatcccgagcttccggagcagtggggctcagttacggtgcccactccaacctctgcatcaaccagcttgtacgcaatgggaatgaggcccagaaagagaagtatctcccgaagctgatcagtggtgagtacatcggagccctggccatgagtgagcccaatgcaggctctgatgttgtctctatgaagctcaaagcggaaaagaaaggaaatcactacatcctgaatggcaacaagttctggatcactaatggccctgatgctgacgtcctgattgtctatgccaagacagatctggctgctgtgccagcttctcggggcatcacagccttcattgtggagaagggtatgcctggctttagcacctctaagaagctggacaagctggggatgaggggctctaacacctgtgagctaatctttgaagactgcaagattcctgctgccaacatcctgggccatgagaataagggtgtctacgtgctgatgagtgggctggacctggagcggctggtgctggccggggggcctcttgggctcatgcaagcggtcctggaccacaccattccctacctgcacgtgagggaagcctttggccagaagatcggccacttccagttgatgcaggggaagatggctgacatgtacacccgcctcatggcgtgtcggcagtatgtctacaatgtcgccaaggcctgcgatgagggccattgcactgctaaggactgtgcaggtgtgattctttactcagctgagtgtgctacacaggtagccctggacggcattcagtgttttggtggcaatggctacatcaatgactttcccatgggccgctttcttcgagatgccaagctgtatgagataggggctgggaccagcgaggtgaggcggctggtcatcggcagagccttcaatgcagactttcactagtcctgagacccttcgcccccttttcctgcacctagtggcctttcttgggaagtagagatgtggcggctttcccaccctgcccacagcaggccctcctgcccagctgctcttgtcagccctctggcctctggatgaggttgagttctccacaacagctcccaagcatcatgggcctcgcagccgggcctgtgccacggctagtgttgtgtgatttaaaatggactcagcaggaagcatattgtctggggattgttgggacaggttttggtgactctgtgcccttgctctctaacttctgagcccacctcccagggtaggcacctgggggcatgcaggtgcccacctcccagggtaggcacctgggggcatgcaggtacccacctctttctcttgggtgaggctctggcaaggagatctctctgctcaagcacagcagaatcatggcccctctccatgaattggaacttggtacaggttaagtatccctaatcctgaaatctgaaacacttgtggttccaagcattttggataaggcaaattcaactttcagtctcttttctgggggaaaaaaataataaacctagcctagccaggcgtggtg

SEQ ID NO: 170 - DNA, 1497 bp, Homo sapiens
ccgggggcttctcagttttattttatcaatctatatgcatatccttatgccagtctcacacagtgttaattactgtagctttgtagtcagttttgaaatcaagaagtatgagtccttcgttcttatttttcaaaattatcttggctgttctgtgtcccgtgtgtttctagataaattttaggatcatcttgtcaatttctggggatattggctgggttcttggtttacttccatgtgttctctttaaatggctagactgggctttggttttttcagtatcgggttggaatctgagaggggaaatggaaacgaaggagaagccgaagcccaccccagattacctgatgcagctgatgaacgacaagaagctcatgagcagcctgcccaacttctgcgggatcttcaaccacctcgagcggctgctggacgaagaaattagcagagtacggaaagacatgtacaatgacacattaaatggcagtacagagaaaaggagtgcagaattgcctgatgctgtgggacctattgttcagttacaagagaaactttatgtgcctgtaaaagaatacccagattttaattttgttgggagaatccttggacctagaggacttacagccaaacaacttgaagcagaaaccggatgtaaaatcatggtccgaggcaaaggctcaatgagggataaaaaaaaggaggagcaaaatagaggcaagcccaattgggagcatctaaatgaagatttacatgtactaatcactttggaagatgctcagaacagagcagaaatcaaattgaagagagcagttgaagaagtgaagaaattattggtacctgcagcagaaggagaagacagcctgaagaagatgcagctgatggagcttgcgattctgaatggcacctacagagatgccgacattaaatcaccagcccttgccttttctcttgcagcaacagcccaggctgctccaaggatcattactgggcctgcgccggttctcccaccagctgccctgcgtactcctacgccagctggccctaccataatgcctttgatcagacaaatacagaccgctgtcatgccaaacggaactcctcacccaactgctgcaatagttcctccagggcccgaagctggtttaatctatacaccctatgagtacccctacacattggcaccagctacatcaatccttgagtatcctattgaacctagtggtgtattaggtgcggtggctactaaagttcgaaggcacgatatgcgtgtccatccttaccaaaggattgtgaccgcagaccgagccgccaccggcaactaacctatgaccttctgacctctgaactcttcacccaatgatgacctgaccatgcctgcctgctgatcagttaactggtaatcgcctttgcttgcctgtcgtcagtgcagcgagctgaggcacttgtccgttcgtcttaccatctaaccaaacaaaagacaaagaaattgttgtcctccaactc

SEQ ID NO: 171 - DNA, 3865 bp, Homo sapiens
cacatgcacacccacacccacgcgcgcccgcaccgccccacgcgcacacactcctgcccacgcccacgcagcgctccgggaagtccggtccgggcgagagcgcgaaaggataccgagaagccacccgcggagagcgcagcggcgccctgggacgcggcgctctcccggcgctgctgcctcggcttggtctcggcctgcgggccgtcggccggcgatggccctggattatctactactgctcctcctggcatccgcagtggctgcgatggaagaaacgttaatggacaccagaacggctactgcagagctgggctggacggccaatcctgcgtccgggtgggaagaagtcagtggctacgatgaaaacctgaacaccatccgcacctaccaggtgtgcaatgtcttcgagcccaaccagaacaattggctgctcaccaccttcatcaaccggcggggggcccatcgcatctacacagagatgcgcttcactgtgagagactgcagcagcctccctaatgtcccaggatcctgcaaggagaccttcaacttgtattactatgagactgactctgtcattgccaccaagaagtcagccttctggtctgaggccccctacctcaaagtagacaccattgctgcagatgagagcttctcccaggtggactttgggggaaggctgatgaaggtaaacacagaagtcaggagctttgggcctcttactcggaatggtttttacctcgcttttcaggattatggagcctgtatgtctcttctttctgtccgtgtcttcttcaaaaagtgtcccagcattgtgcaaaattttgcagtgtttccagagactatgacaggggcagagagcacatctctggtgattgctcggggcacatgcatccccaacgcagaggaagtggacgtgcccatcaaactctactgcaacggggatggggaatggatggtgcctattgggcgatgcacctgcaagcctggctatgagcctgagaacagcgtggcatgcaaggcttgccctgcagggacattcaaggccagccaggaagctgaaggctgctcccactgcccctccaacagccgctcccctgcagaggcgtctcccatctgcacctgtcggaccggttattaccgagcggactttgaccctccagaagtggcatgcactagcgtcccatcaggtccccgcaatgttatctccatcgtcaatgagacgtccatcattctggagtggcaccctccaagggagacaggtgggcgggatgatgtgacctacaacatcatctgcaaaaagtgccgggcagaccgccggagctgctcccgctgtgacgacaatgtggagtttgtgcccaggcagctgggcctgacggagtgccgcgtctccatcagcagcctgtgggcccacaccccctacacctttgacatccaggccatcaatggagtctccagcaagagtcccttccccccacagcacgtctctgtcaacatcaccacaaaccaagccgccccctccaccgttcccatcatgcaccaagtcagtgccactatgaggagcatcaccttgtcatggccacagccggagcagcccaatggcatcatcctggactatgagatccggtactatgagaaggaacacaatgagttcaactcctccatggccaggagtcagaccaacacagcaaggattgatgggctgcggcctggcatggtatatgtggtacaggtgcgtgcccgcactgttgctggctacggcaagttcagtggcaagatgtgcttccagactctgactgacgatgattacaagtcagagctgagggagcagctgcccctgattgctggctcggcagcggccggggtcgtgttcgttgtgtccttggtggccatctctatcgtctgtagcaggaaacgggcttatagcaaagaggctgtgtacagcgataagctccagcattacagcacaggccgaggctccccagggatgaagatctacattgaccccttcacttatgaggatcccaacgaagctgtccgggagtttgccaaggagattgatgtatcttttgtgaaaattgaagaggtcatcggagcaggggagtttggagaagtgtacaaggggcgtttgaaactgccaggcaagagggaaatctacgtggccatcaagaccctgaaggcagggtactcggagaagcagcgtcgggactttctgagtgaggcgagcatcatgggccagttcgaccatcctaacatcattcgcctggagggtgtggtcaccaagagtcggcctgtcatgatcatcacagagttcatggagaatggtgcattggattctttcctcaggcaaaatgacgggcagttcaccgtgatccagcttgtgggtatgctcaggggcatcgctgctggcatgaagtacctggctgagatgaattatgtgcatcgggacctggctgctaggaacattctggtcaacagtaacctggtgtgcaaggtgtccgactttggcctctcccgctacctccaggatgacacctcagatcccacctacaccagctccttgggagggaagatccctgtgagatggacagctccagaggccatcgcctaccgcaagttcacttcagccagcgacgtttggagctatgggatcgtcatgtgggaagtcatgtcatttggagagagaccctattgggatatgtccaaccaagatgtcatcaatgccatcgagcaggactaccggctgcccccacccatggactgtccagctgctctacaccagctcatgctggactgttggcagaaggaccggaacagccggccccggtttgcggagattgtcaacaccctagataagatgatccggaacccggcaagtctcaagactgtggcaaccatcaccgccgtgccttcccagcccctgctcgaccgctccatcccagacttcacggcctttaccaccgtggatgactggctcagcgccatcaaaatggtccagtacagggacagcttcctcactgctggcttcacctccctccagctggtcacccagatgacatcagaagacctcctgagaataggcatcaccttggcaggccatcagaagaagatcctgaacagcattcattctatgagggtccagataagtcagtcaccaacggcaatggcatgagaactcttgtttcttggggaaggagaggagggaaaaggaccagggtcaagggggaccagaggttgaccactgtggaatgtactggagagactggcttctcagctgaggaatgcatttccatcagtgaagaatcaaccggacctgttgctagcaggcaatctccatttctcagtgacagaagcatgtttgagatgccgtgggaaaccaaatatataataataaaaatataaaaaggtgatgttcaacagaagtgaagacaaaacaatatgcatcaggagaacaagagtaaacccagctcccactctcagtgggctgcagttgcccaaccacaggaagaaagggaaggaggtagagggaagaaacagaagcagtgttccattttcttcctcaccaatgacattcttttcttttctcctttcgtactcctccctgagagtcccctcccttctcccacactcgtttccctttgctcatgactcctgtagggaagtttcttcaaacaaaacccagctcctgagtctccagatgttgttctgtcagttgccaaaggactttgctgaccactgcatggggatccaaccaattcaattaatgtcttcatattgaagaagagatgtaccttcaattgaaaacctcgtttttcttttgtttgcattttctgcaaaaaggaaaaagaaaccacaaattggggaattc

SEQ ID NO: 172 - DNA, 1709 bp, Homo sapiens
gggcggggtgccgcatccccagcccgccgccatggccgcctacaaactggtgctgatccggcacggcgagagcgcatggaacctggagaaccgcttcagcggctggtacgacgccgacctgagcccggcgggccacgaggaggcgaagcgcggcgggcaggcgctacgagatgctggctatgagtttgacatctgcttcacctcagtgcagaagagagcgatccggaccctctggacagtgctagatgccattgatcagatgtggctgccagtggtgaggacttggcgcctcaatgagcggcactatgggggtctaaccggtctcaataaagcagaaactgctgcaaagcatggtgaggcccaggtgaagatctggaggcgctcctatgatgtcccaccacctccgatggagcccgaccatcctttctacagcaacatcagtaaggatcgcaggtatgcagacctcacagaagatcagctaccctcctgtgagagtctgaaggatactattgccagagctctgcccttctggaatgaagaaatagttccccagatcaaggaggggaaacgtgtactgattgcagcccatggcaacagcctccggggcattgtcaagcatctggagggtctctctgaagaggctatcatggagctgaacctgccgactggtattcccattgtctatgaattggacaagaacttgaagcctatcaagcccatgcagtttctgggggatgaagagacggtgcgcaaagccatggaagctgtggctgcccagggcaaggccaagaagtgaaggccggcggggaggatactgtccccaggagcaccctccctgcccgtcttgtccctctgcccctcccacctgcacatgtcacactgaccacatctgtagacatcttgagttgtagctgcagacggggaccagtggctcccattttcattttagccattttgtcgcctgcacccactcccttcatacaatctagtcagaatagcagttctagagcacaggttctcagtctaagctatggaaaagctccccttatccaacagagtttaaaagtagtgacttgggtttttgcgagtgctttgtttactaaggactttggggaggaaccatgctaagccatgaccagtgaggagaagcaacagagcctgtctgtccccatgagcggagtctgtcctctgctcttctgcagtcaggtcactgcctactgcctgggggctctagtcattccagtggaagacgaatgtaacctgcgtggtgatgtgacaactgtttcctccctgaccccagaggatctggctctaggttgggatcaatcctgaatttcgttatgtgttaatttacttttattaaaaaagtatagtatatataatacaaaacaataacccttctggggtttcttgtggcggttgaaatagtcccacatgtggtcatcagaaatagcattcctcataccaatataggatcagctccttgacctctgaggggtcaggagtgcttcctggtgtgtgtattagaatcccttcctgccttgtttcatggcagtgaaatgcctcttggtcctgtccagtgtatctttcactgatttctgaatcatgttctagttgcttgaccctgccacatgggtccagtgttcatctgagcataactgtactaaatcctttttccatatcagtataataaaggagtgatgtgcaat

SEQ ID NO: 173 - DNA, 392 bp, Homo sapiens
agtctgggacgcgccgccgccatgatcatccctgtacgctgcttcacttgtggcaagatcgtcggcaacaagtgggaggcttacctggggctgctgcaggccgagtacaccgagggggacgcgctggatgccctgggcctgaagcgctactgctgccgccggatgctgctggcccacgtggacctgatcgagaagctgctcaattatgcacccctggagaagtgaccacgctgaaacccacccacccgctgtgctgaccatgggccctgagcgtcctaccccgaattcacgaggctgaggcatccgggagctggcgtaatgcctggccgcagtgtgtgtgtatcccataccccactctggaaggaaccatccagtaaaggtctttcagaacc

SEQ ID NO: 174 - DNA, 1880 bp, Homo sapiens
ctttcccacccttcctccccacaaggctgtctgagatgccaccttccacctaaacatcatctcccaaattttaatccttaactttggtctctgacttctgcttgattccacagtctccacccacatttgcacaaaggaccatcacctgtccttcctggaatctctaaagttttctgctttccttctgtcctgatggccagctctgctaagtcagctgagatgcccaccatctccaaaacccttaaccctactcctgatcctcatcaagaatatctggaccctaggattaccattgccttattcgaaattggatcacattccccttcctcctggggctctctccctttcctaaagaatagcagccatcaagttacagaacaacagactgcacagaagtttaacaatctcttaaaagaaattaaagatattcttaaaaatatggcaggttttgaagagaagatcacagaagcaaaagaactttttgaggaaaccaatattactgaggatgtgtcagcccacaaagaaaatatcagaggacttgacaaaatcaatgaaatgttatcaacaaacctgcctgttagtttagccccagagaaagaagacaatgaaaagaaacaggagatgatattggaaaccaatattactgaggatgtgtcagcccacaaagaaaatatcagaggacttgacaaaatcaatgaaatgttatcaacaaacctgcctgttagtttagccccagagaaagaagacaatgaaaagaaacagcagatgataatggaaaaccagaactctgagaacaccgcacaagtttttgcaagagatttggtaaatcgtttagaagaaaaaaaagtccttaacgaaactcaacaaagtcaggaaaaagcaaaaaacagacttaatgttcaagaagaaactatgaaaattaggaacaacatggagcagttactacaggaagcagaacactggagtaaacaacatactgagctcagtaaactgataaaatcctatcagaaatctcagaaagacataagtgaaactcttggaaataatggagtcggtttccaaacccagccaaataatgaagtgtcggctaagcatgagctggaggaacaggtgaagaaactgagccatgacacctattcattgcagttgatggcagctttgctagagaatgaatgccaaatcttacagcagagagtagagattctcaaggaactccatcatcagaaacagggaactctgcaagagaagccaattcagataaactataaacaggacaagaaaaatcagaagccatcagaagcaaagaaagtagaaatgtataagcagaacaagcaagcaatgaagggtacattttggaaaaaagacagatcctgtagaagcctggatgtttgtcttaataagaaagcttgcaatacccagttcaatattcatgttgcaagaaaagctcttaggggaaaaatgaggtcagctagcagcctaagatagaaaataccaaaagcagatgaaaaggtgaatccttaaaaaactacatctgttacctccaacttgtcagtcatgatcaatcatcaaaccttgggcagatctgctggttcaaccaagaaagagctatagaataaggagattgacacttatattactcattacttcagcagttatgtaagtctggtctttaatgaccattgtgtctacatcaagttcataacttttcacctttacaatctgcttgttttttttgtaattattagatagacagcctagagtgagaagttaaaggtccaattaagttaagatctaaataaaaaccagaatacaagggaaaaaaaaaaaaaaaaaaaaaaaaaaaaaaaaaaaaaaaaaaaaaaaaaaaaaaaaaaaaaaaa

SEQ ID NO: 175 - DNA, 3018 bp, Homo sapiens
ctcctcacaggtgtgtctctagtcctcgtggttgcctgccccactccctgccgagacgcctgccagaaaggtcacctatcctgaaccccagcaagcctgaaacagctcagccaagcaccctgcgatggaagctgcagatgcctccaggagcaacgggtcgagcccagaagccagggatgcccggagcccgtcgggccccagtggcagcctggagaatggcaccaaggctgacggcaaggatgccaagaccaccaacgggcacggcggggaggcagctgagggcaagagcctgggcagcgccctgaagccaggggaaggtaggagcgccctgttcgcgggcaatgagtggcggcgacccatcatccagtttgtcgagtccggggacgacaagaactccaactacttcagcatggactctatggaaggcaagaggtcgccgtacgcagggctccagctgggggctgccaagaagccacccgttacctttgccgaaaagggcgagctgcgcaagtccattttctcggagtcccggaagcccacggtgtccatcatggagcccggggagacccggcggaacagctacccccgggccgacacgggccttttttcacggtccaagtccggctccgaggaggtgctgtgcgactcctgcatcggcaacaagcagaaggcggtcaagtcctgcctggtgtgccaggcctccttctgcgagctgcatctcaagccccacctggagggcgccgccttccgagaccaccagctgctcgagcccatccgggactttgaggcccgcaagtgtcccgtgcatggcaagacgatggagctcttctgccagaccgaccagacctgcatctgctacctttgcatgttccaggagcacaagaatcatagcaccgtgacagtggaggaggccaaggccgagaaggagacggagctgtcactgcaaaaggagcagctgcagctcaagatcattgagattgaggatgaagctgagaagtggcagaaggagaaggaccgcatcaagagcttcaccaccaatgagaaggccatcctggagcagaacttccgggacctggtgcgggacctggagaagcaaaaggaggaagtgagggctgcgctggagcagcgggagcaggatgctgtggaccaagtgaaggtgatcatggatgctctggatgagagagccaaggtgctgcatgaggacaagcagacccgggagcagctgcatagcatcagcgactctgtgttgtttctgcaggaatttggtgcattgatgagcaattactctctccccccacccctgcccacctatcatgtcctgctggagggggagggcctgggacagtcactaggcaacttcaaggacgacctgctcaatgtatgcatgcgccacgttgagaagatgtgcaaggcggacctgagccgtaacttcattgagaggaaccacatggagaacggtggtgaccatcgctatgtgaacaactacacgaacagcttcgggggtgagtggagtgcaccggacaccatgaagagatactccatgtacctgacacccaaaggtggggtccggacatcataccagccctcgtctcctggccgcttcaccaaggagaccacccagaagaatttcaacaatctctatggcaccaaaggtaactacacctcccgggtctgggagtactcctccagcattcagaactctgacaatgacctgcccgtcgtccaaggcagctcctccttctccctgaaaggctatccctccctcatgcggagccaaagccccaaggcccagccccagacttggaaatctggcaagcagactatgctgtctcactaccggccattctacgtcaacaaaggcaacgggattgggtccaacgaagccccatgagctcctggcggaaggaacgaggcgccacacccctgctcttcctcctgaccctgctgctcttgccttctaagctactgtgcttgtctgggtgggagggagcctggtcctgcacctgccctctgcagccctctgccagcctcttgggggcagttccggcctctccgacttccccactggccacactccattcagactcctttcctgccttgtgacctcagatggtcaccatcattcctgtgctcagaggccaacccatcacaggggtgagataggttggggcctgccctaacccgccagcctcctcctctcgggctggatctgggggctagcagtgagtacccgcatggtatcagcctgcctctcccgcccacgccctgctgtctccaggcctatagacgtttctctccaaggccctatcccccaatgttgtcagcagatgcctggacagcacagccacccatctcccattcacatggcccacctcctgcttcccagaggactggccctacgtgctctctctcgtcctacctatcaatgcccagcatggcagaacctgcagcccttggccactgcagatggaaacctctcagtgtcttgacatcaccctacccaggcggtgggtctccaccacagccactttgagtctgtggtccctggagggtggcttctcctgactggcaggatgaccttagccaagatattcctctgttccctctgctgagataaagaattcccttaacatgatataatccacccatgcaaatagctactggcccagctaccatttaccatttgcctacagaatttcattcagtctacactttggcattctctctggcgatggagtgtggctgggctgaccgcaaaaggtgccttacacactgcccccaccctcagccgttgccccatcagaggctgcctcctccttctgattaccccccatgttgcatatcagggtgctcaaggattggagaggagacaaaaccaggagcagcacagtggggacatctcccgtctcaacagccccaggcctatgggggctctggaaggatgggccagcttgcaggggttggggagggagacatccagcttgggctttcccctttggaataaaccattggtctgtc

SEQ ID NO: 176 - DNA, 915 bp, Homo sapiens
atgatttacacaatgaagaaagtacatgcactttgggcttctgtatgcctgctgcttaatcttgcccctgcccctcttaatgctgattctgaggaagatgaagaacacacaattatcacagatacggagttgccaccactgaaacttatgcattcattttgtgcattcaaggcggatgatggcccatgtaaagcaatcatgaaaagatttttcttcaatattttcactcgacagtgcgaagaatttatatatgggggatgtgaaggaaatcagaatcgatttgaaagtctggaagagtgcaaaaaaatgtgtacaagagataatgcaaacaggattataaagacaacattgcaacaagaaaagccagatttctgctttttggaagaagatcctggaatatgtcgaggttatattaccaggtatttttataacaatcagacaaaacagtgtgaacgtttcaagtatggtggatgcctgggcaatatgaacaattttgagacactggaagaatgcaagaacatttgtgaagatggtccgaatggtttccaggtggataattatggaacccagctcaatgctgtgaataactccctgactccgcaatcaaccaaggttcccagcctttttgaatttcacggtccctcatggtgtctcactccagcagacagaggattgtgtcgtgccaatgagaacagattctactacaattcagtcattgggaaatgccgcccatttaagtacagtggatgtgggggaaatgaaaacaattttacttccaaacaagaatgtctgagggcatgtaaaaaaggtttcatccaaagaatatcaaaaggaggcctaattaaaaccaaaagaaaaagaaagaagcagagagtgaaaatagcatatgaagaaatttttgttaaaaatatgtga

SEQ ID NO: 177 - DNA, 784 bp, Homo sapiens
gagcggttgcgcagtgaaggctagacccggtttactggaattgctctggcgatcgaggggtcctagtacaccgcaatcatgtctattatgtcctataacggaggggccgtcatggccatgaaggggaagaactgtgtggccatcgctgcagacaggcgcttcgggatccaggcccagatggtgaccacggacttccagaagatctttcccatgggtgaccggctgtacatcggtctggccgggctcgccactgacgtccagacagttgcccagcgcctcaagttccggctgaacctgtatgagttgaaggaaggtcggcagatcaaaccttataccctcatgagcatggtggccaacctcttgtatgagaaacggtttggcccttactacactgagccagtcattgccgggttggacccgaagacctttaagcccttcatttgctctctagacctcatcggctgccccatggtgactgatgactttgtggtcagtggcacctgcgccgaacaaatgtacggaatgtgtgagtccctctgggagcccaacatggatccggatcacctgtttgaaaccatctcccaagccatgctgaatgctgtggaccgggatgcagtgtcaggcatgggagtcattgtccacatcatcgagaaggacaaaatcaccaccaggacactgaaggcccgaatggactaaccctgttcccagagcccacttttttttctttttttgaaataaaatagcctgtctttcaaaaaaaaaaaaaaaaaaaaaaaaaaaaaaa

SEQ ID NO: 178 - DNA, 532 bp, Homo sapiens
  misc_feature (481)..(481): Wherein n may be a, c, g or t
tttggcatggacacaagtggggcatcacctttattgccataaagtagggccctgtgggtaggcagctggactggcattctctgaactggcagtggttggggagattcaaactgcagttcaaaatgagggtcccatgggtcccaaataccttctcctggcccagaaagggtatgggggtgacccatccagtcagctccaacctccaggaggaccctgccagctccaaacacttgactctttagatagagagctgtcccccaacgcagtgccaccccccccagtccagcctgactcagttgaacacatcgtacagcagcctggagccacactcctggtacatggcccgagttatccagcggcgctggaaggagtgcagggaggccaccatggagccgccggtccacacagccatgccacgcccatgcttggccaccaggtggggccgcagggccgcgtagccgtgccgccggcactgcgcctncagctccttgtccaggcgctcggcgaagccaggaaacagtgtggagccgcc

SEQ ID NO: 179 - DNA, 689 bp, Homo sapiens
gcaagagagcgggaagccgagctgggcgagaagtaggggagggcggtgctccgccgcggtggcggttgctatcgcttcgcagaacctactcaggcagccagctgagaagagttgagggaaagtgctgctgctgggtctgcagacgcgatggataacgtgcagccgaaaataaaacatcgccccttctgcttcagtgtgaaaggccacgtgaagatgctgcggctggcactaactgtgacatctatgaccttttttatcatcgcacaagcccctgaaccatatattgttatcactggatttgaagtcaccgttatcttatttttcatacttttatatgtactcagacttgatcgattaatgaagtggttattttggcctttgcttgatattatcaactcactggtaacaacagtattcatgctcatcgtatctgtgttggcactgataccagaaaccacaacattgacagttggtggaggggtgtttgcacttgtgacagcagtatgctgtcttgccgacggggcccttatttaccggaagcttctgttcaatcccagcggtccttaccagaaaaagcctgtgcatgaaaaaaaagaagttttgtaattttatattactttttagtttgatactaagtattaaacatatttctgtattcttccaaaaaaaaaaaaaaaaaaaaaaaaaaa

SEQ ID NO: 180 - DNA, 2784 bp, Homo sapiens
gatgccccgcccgcgcccatggcgcagccacacacgacctcggtcccgtacttcgcgcgctctcctgcaccgccgccgccatctcgctcaggagctcctccacaaccgccggcaacactacggccatcgcgccgcaggacacgccctccacgaccggcggaccgccgcgacgctccagctgactgcgcctacctgtggaggatcctgaccccccgccggggcagggcgagacggagtgacgtcggggcgcgtcatcgcgcgtgcggacgcagggatgtcctgctcagtcgtcagggcccggccaatccggagggcgctcggcgcgtggtcgggggccaggagcgcgtctggcctgcagtgcgcagaggacgcggcgggagcatgttccggctcctgagctggagcctgggccgaggcttcctgcgggccgcggggcggcggtgccggggctgctccgcgcgcctgctcccggggctggcaggaggtccggggcccgaggtgcaggtgccgccatcccgagtcgcgccgcacggccggggcccaggcctgctgccgctgctggcagcgctcgcctggttctcgaggcccgctgcggcagaggaggaggagcagcagggagccgacggggccgctgccgaggacggggcggacgaggccgaggcagagatcatccagctgctgaagcgagccaagttgagcattatgaaagatgagccagaagaggctgagttaattttgcatgacgctcttcgtctcgcctatcagactgataacaagaaggccatcacttacacttatgatttgatggccaacttagcatttatacggggtcagcttgaaaatgctgaacaactttttaaagcaacaatgagttacctccttggagggggcatgaagcaggaggacaatgcaataattgaaatttccctaaagctggccagtatctatgctgcgcagaacagacaggaatttgctgttgctggctatgaattctgcatttcaactctagaggaaaaaattgaaagagaaaaggaattagcagaagacattatgtcagtggaagagaaagccaatacccacctcctcttgggcatgtgcttagacgcctgtgctcgctaccttctgttctccaagcagccgtcacaggcacaaaggatgtatgaaaaagctctgcagatttctgaagaaatacaaggagaaagacacccacagaccattgtgctgatgagtgacctggctactaccctggatgcacagggccgctttgatgaggcctatatttatatgcaaagggcatcagatctggcaagacagataaatcatcctgagctacacatggtactcagtaatctagctgcagttttgatgcacagagaacgatatacacaagcaaaagagatctaccaggaagcactgaagcaagcaaagctgaaaaaagatgaaatttctgtacaacacatcagggaagagttggctgagctgtcaaagaaaagtagacctttgacaaattctgtcaagctctaaatccatttttgtgtagggagaataatgtctagtaatgtggaagaatagctatcattcctgtctctgtggcacccgatcaatggcttaaatctgtcgtttttgatattcaggtttcctcaatttagccttagtgaaggaggggttgtacacactgccatttttgtattttaaaggaaaaatgactttcattcccaactgattatgacctttcaggatgtcgtcaagtgatgctttcagttgtaacacgtgacttggtgctgtccctgctggtctaagtagaactgtagattcatatgggctggtgttcctgtgcgctgtgggtgtggtgattcagcctggcatttctaccataagtttttggtctgctgatttgctgccctgtcttctcttactttactttatcaatacctggcaaactgaccagaattaccttcctcatggcaaagggggattatggtgaattgttgttcttatagtctgtttcatgaagcacaagtggaatttaatacataaaagagaaaaatatcttagtttgctaccagcatccagcatgaagttgtaaagtggggattaggcacgtgacagtatagcacccatttgaatttaaataaaagtgaaccatatttatctggttatataaaactaaaaatgggggtgtttatataaaactaaaaactaagaatgatgtaaccttttgtctgtgttatctgaacactctacttcctttgcagccttagtcacacaactgagtcatctcaagtactctttaaggacacacagcccaggctgttctgagtcagaataggcccctacaggtatattttaaaactcttcgtaattctaatgtgtactgctggtatagctgaactactgacctggatcttagtcctagcctttttgcttttgcaatttcagtatcttcatctctaaactagggaaacactgggattctttcttagctgtgggggaaggtatttggttagatgactttgaatgaatagactgctgtgctgaaagagctttatcacactgtctcaaagtatgtaaagatacataggtggatgctcttactgcagcagtcatgaatacatttttagccatttacctaaggaaaaagacagtttttctaggtaccatgaaggaagattgaccctgttggtatgcctgtgggggtgggatgtgagtgggactgataaactgatacttttggttcgtatgtacatactggaagaatcttcataataaatgagactacacaac

SEQ ID NO: 181 - DNA, 2112 bp, Homo sapiens
cccgcttctggagtgttatcgtcaccatgtccctaatggtctcggctggccggggcctgggggccgtgtggtccccaacccacgtgcaggtgacggtgctgcaggcgcggggcctgcgggccaagggccccgggggcacgagcgacgcgtacgcggtgatccaggtgggcaaggagaagtacgccacctccgtgtcggagcgcagcctgggcgcgcccgtgtggcgcgaggaggccaccttcgagctgccatcgctgctgtcctccggacccgcggccgccgccaccctgcagctcaccgtgctgcaccgcgcgctgctcggcctcgacaagttcctgggccgcgccgaggtggacctgcgggatctgcaccgcgaccagggccgcaggaagacgcagtggtataagttgaaatccaaaccaggaaagaaggacaaggagcgaggagaaattgaggttgacatccagtttatgagaaacaacatgactgccagcatgtttgacctttctatgaaagacaagtctcggaatccatttggaaagctgaaggacaagatcaaggggaagaataaggacagtgggtcagacaccgcctccgccatcatccctagcacgacaccttcggtcgacagtgatgatgagtctgtggttaaagacaagaaaaagaaatcaaagatcaagaccttactttccaagtcaaatttgcagaagacgcctctttcccagtccatgtctgtcctgccgacttcaaagccagaaaaagtgctgcttcgtcccggagactttcagtcccagtgggatgaagatgacaatgaggatgagtcctcctcggcctcggatgtcatgtctcacaagagaacagcgagtacggatcttaagcaactgaaccaggtcaactttacccttcccaagaaggaaggactttcctttcttggtggccttcggtctaagaatgatgtcctttcccgctctaatgtctgcatcaatgggaaccatgtttacctggagcagccccaacccaccggtgagatcaaggatagcagcccgtcctcctccccatcccccaagggtttcagaaagaaaacattgttctcttctacagagaacctggcggctgggtcttggaaggagcctgctgaaggaggtgggctgtctactgacagggatgtctccgaatcttccaccaaggactccttgaagtctatgaccttgccgacctaccgacctgccccactgatcagtggggacctcagggaaaaaatggcccccgcaaactcagaggccacaaaagaagctaaggagagcaagaagccagagagcaggaggtcctctttgctgtctctgatgacggggaagaaggatgtggctaagggcagtgaaggtgaaaaccttctcacggtcccagggagggagaaggaaggcatgctgatgggggttaagccgggggaggacgcatcggggcctgctgaagaccttgtgagaagatctgagaaagatactgcagctgttgtctccagacagggcagctccctgaacctctttgaagatgtgcagatcacagaaccagaagctgagccagagtccaagtctgaaccgagacctccaatttcctctccgagggctccccagaccagagctgtcaagccccgacttcatcctgtgaagccaatgaatgccacggccaccaaggttgctaactgcagcttgggaactgccaccatcatcagtgagaacttgaacaatgaggtcatgatgaagaaatacagcccctcggaccctgcatttgcatatgcgcagctgacccacgatgagctgattcagctggtcctcaaacagaaggaaacgataagcaagaaggagttccaggtccgcgagctggaagactacattgacaacctgcttgtcagggtcatggaagaaacccccaatatcctccgcatcccgactcaggttggcaaaaaagcaggaaagatgtaaatcagcagaaaaaaaacaccgagacgtttctgtgacttcactttcacctgctccaggggtcaaggacttgccttgcctgataaccagccagcaggctccgaatcaccatctccctcacatgttatccggcaagagt

SEQ ID NO: 182 - DNA, 2997 bp, Homo sapiens
caagaggtgcagagcaagcgcatgcgtcgtgacggcccggcttaggcgactctgggcgggtctgggccgctccagtgttttggggcacagaagctgtgggaggagctggaggcttcaccgtggtaaccacagcgccgctgctgccccgccttgcaggcctcaggactgtcatcgcctctgggtgtgagggtactttggccaccgtccccggaaataaccgcgcctgcctctcaagataccccatcctctccacgccgctgccgctgccgccatgcaaggggaggacgccagatacctcaaaaggaaagttaaaggagggaatatagatgtacatccatcagaaaaagcactcattgttcactatgaagtggaagctaccattcttggagaaatgggggaccccatgttgggagaacgaaaagaatgtcaaaaaatcattcgacttaagagtctcaatgccaacacagatataacttccctggcaaggaaggtggttgaagaatgtaaactcattcatccttcaaaactaaatgaggtagaacagctgttgtactatctacagaaccgccgtgattcattgtcaggaaaagagaaaaaagaaaaatcaagcaagcctaaagatccacctccttttgaaggaatggagattgatgaagttgctaacattaatgacatggatgaatatattgagttattatatgaagatattcctgacaaagttcggggttctgctttgatcctgcagcttgctcgaaatcctgataacttggaagaactactattgaatgaaactgcccttggtgcattagcaagggtcctgagagaagactggaagcaaagtgtcgagttagctacaaacataatttacatctttttttgtttctccagcttttctcaatttcatggacttattactcactataaaattggagctctgtgtatgaatattattgatcatgagttaaaaagacatgagctttggcaagaagaactctcaaagaagaagaaagctgttgatgaagaccctgaaaaccaaaccttgagaaaggattatgaaaaaacctttaaaaagtaccaggggcttgtggtaaaacaggaacagctattacgagttgctctttatttgcttctgaatcttgctgaggatactcgtaccgaactgaaaatgaggaacaagaacatagttcacatgttggtgaaagcccttgatcgggacaattttgagctgctaattttagttgtgtcattcttgaagaaactcagcatttttatggagaataaaaatgatatggtggaaatggatattgttgaaaaactggtgaaaatgataccttgtgagcatgaagacctgctgaatatcaccctccgacttttactaaacctatcctttgacacaggactgaggaataagatggtacaagttggactgcttcccaagctcactgcactcctaggcaatgacaactacaaacaaatagcaatgtgtgttctttaccacataagcatggatgaccgctttaaatcaatgtttgcatacactgactgtataccacagttaatgaagatgctgtttgaatgttcagatgaacgaattgacttggaactcatttctttctgcattaatcttgctgctaacaaaagaaatgtacagcttatctgtgaaggaaatgggctgaagatgctcatgaagagggctctgaagtttaaggatccattgctgatgaaaatgattagaaacatttctcagcatgatggaccaactaaaaatctgtttattgattatgttggggaccttgcagcccagatctctaatgatgaagaagaggagtttgtgattgaatgtttgggaactcttgcaaacttgaccattccagacttagactgggaattggttcttaaagaatataagttggttccatacctcaaggataaactaaaaccaggtgctgcagaagatgatcttgttttagaagtggttataatgattggaactgtatccatggatgactcttgtgctgcattgctagccaaatctggcataatccctgcactcattgaattgctaaatgctcaacaagaagatgatgaatttgtgtgtcagataatttatgtcttctaccagatggttttccaccaagccacaagagacgtcataatcaaggaaacacaggctccagcatatctcatagacctaatgcatgataagaataatgaaatccgaaaggtctgtgataatacattagatattatagcggaatatgatgaagaatgggctaagaaaattcagagtgaaaagtttcgctggcataactctcagtggctggagatggtagagagtcgtcagatggatgagagtgagcagtacttgtatggtgatgatcgaattgagccatacattcatgaaggagatattctcgaaagacctgaccttttctacaactcagatggattaattgcctctgaaggagccataagtcccgatttcttcaatgattaccaccttcaaaatggagatgttgttgggcagcattcatttcctggcagccttggaatggatggctttggccaaccagttggcattcttggacgccctgccacagcatatggattccgccctgatgaaccttactactatggctatggatcttgataaagtatctgtttccatgtgtaatctcagcttagaagaaatctgtgtgggttgggttaattttggatctttgcctaataatgcatgttgatgttattgtgggtctgtgtttgtttttatttttatatgttgttagctgcagattaaccccagcccctctgtcttctgttaagtacagttgatactgacattgttcactcatcaaaccacatcttgatgctaagtaacatttcccatgagcctcaaaactgaatgctgaaaagctactagactggaaaacaaacactgcattatgtatgttaagtgactaatttaatttcaattaaaaagcgtaaagtgaaaatgaa

SEQ ID NO: 183 - DNA, 394 bp, Homo sapiens
aaggaaggaaggaaggaaggaaggaaggaaggaaagaaagaaattcatccagcatgtccctttcttctcctatgggatttaccaactgacaaattctagtgctcctgccatcacccacacatgtgcagcaaagcctccacatttgcaaaatctaagtcaatctctaaaagatgcttcgaggaagcacccagttccttctgctaataaccgcagtgtgtcatgtgacacctccccctcccccaaccagttctctctgaaaactacccacccaccccaccaataaagtagcatgacgtctgtccttcagctgccaatatctacaatcaaccaacaagtcattaaaaaaaaaaaaaaaaaaaaaaaaaaaaaaaaaaaaaaaaaaaaaaaaaaagaa

SEQ ID NO: 184 - DNA, 140 bp, Homo sapiens
gtctgagtgctactgaagaggacgtcgtcacttctggaccaagccctgcccaacgacgtcctcttcagtagcacgtacccttctctccccaagtcgatcccgttgaggaggccttcttacaccttaggaatgaaatcgct

SEQ ID NO: 185 - DNA, 553 bp, Homo sapiens
ggcagaggggttacaactcaggttcccacacctcgcttttcacagcctccgagggcagcagtgcacatgggggagacatctcccacgaggccaaggcctccagtgctcaccgatgccctctgtgaagttggggtagaactcgtcagtgaaaaggggctcgggcagctcacggaagtacagcttcagcatgcctgcgatggcgttcacgtccatctcgctcatcatcaccgacacgtccttgttatctggaaagagcatggaaatgcagcggcctccttgaagatcctgataaatgaagaaaagacacagagaaggatgtgacatgcctgggccgtggagcactctgagatctcatcgcggacaccactgcccacacctccatcccgtcctgcgcaggccggcactcactgacgttgaagcctgccttcagtgcctggatgtccgtggccaccccagacatgcggtagatgcccacctcctccatgcctcggcgcttgatctcctcacacactggcgcacgatgtagggcacttggacctctctctcctgcgga

SEQ ID NO: 186 - DNA, 908 bp, Homo sapiens
aaaattcggcacgaggccgggctgtggtctagcataaaggcggagcccagaagaaggggcggggtatgggagaagcctccccacctgcccccgcaaggcggcatctgctggtcctgctgctgctcctctctaccctggtgatcccctccgctgcagctcctatccatgatgctgacgcccaagagagctccttgggtctcacaggcctccagagcctactccaaggcttcagccgacttttcctgaaaggtaacctgcttcggggcatagacagcttattctctgcccccatggacttccggggcctccctgggaactaccacaaagaggagaaccaggagcaccagctggggaacaacaccctctccagccacctccagatcgacaagatgaccgacaacaagacaggagaggtgctgatctccgagaatgtggtggcatccattcaaccagcggaggggagcttcgagggtgatttgaaggtacccaggatggaggagaaggaggccctggtacccatccagaaggccacggacagcttccacacagaactccatccccgggtggccttctggatcattaagctgccacggcggaggtcccaccaggatgccctggagggcggccactggctcagcgagaagcgacaccgcctgcaggccatccgggatggactccgcaaggggacccacaaggacgtcctagaagaggggaccgagagctcctcccactccaggctgtccccccgaaagacccacttactgtacatcctcaggccctctcggcagctgtaggggtggggaccggggagcacctgcctgtagcccccatcagaccctgccccaagcaccatatggaaataaagttctttcttacatctaaaaaaaaaaaaaaaaaaaaaaaaaaaa

SEQ ID NO: 187 - DNA, 691 bp, Homo sapiens
gacccctcacactcacctagccaccatggacatcgccatccaccacccctggatccgccgccccttctttcctttccactcccccagccgcctctttgaccagttcttcggagagcacctgttggagtctgatcttttcccgacgtctacttccctgagtcccttctaccttcggccaccctccttcctgcgggcacccagctggtttgacactggactctcagagatgcgcctggagaaggacaggttctctgtcaacctggatgtgaagcacttctccccagaggaactcaaagttaaggtgttgggagatgtgattgaggtgcatggaaaacatgaagagcgccaggatgaacatggtttcatctccagggagttccacaggaaataccggatcccagctgatgtagaccctctcaccattacttcatccctgtcatctgatggggtcctcactgtgaatggaccaaggaaacaggtctctggccctgagcgcaccattcccatcacccgtgaagagaagcctgctgtcaccgcagcccccaagaaatagatgccctttcttgaattgcattttttaaaacaagaaagtttccccaccagtgaatgaaagtcttgtgactagtgctgaagcttattaatgctaagggcaggcccaaattatcaagctaataaaatatcattcagcaac

SEQ ID NO: 188 - DNA, 2069 bp, Homo sapiens
ttatagcaaaatcagtgcaaataaaaatccctcagtgacctcactggatgtgagtatattgggcctgggacagggctgggggctaacaccctgtgtgagatgagtgtctttgtgtctgtgcttgatgttggtggctctctgtagtcacatgacagcatgggtgtgatggagatctgacttcattcaacaaacatattttctaaggagttccctgtgccaggcactaagctgggcactgggaatgtaataaaatagtcaaggtcccaccttctaagactgtccgacagggaaacgaacaagagtcaaataaggcagaagatgtgatgtaatacacctacgaaatctcagagggttgtagggtcgtgggagctcaagtgagacacttaacctggcctgagacattccagaaggcctcctgaagaactgacatctgaactgagaactgaaggaagatgagtactagtgaggctaccggacgtgaatgtggagattgtgcagggcaatgcaagaggaggctgtagaagtcaacctggctagatcacagcggggtgtatgtggggcaggagcttctttgtttgaatttgctcctgagaggatgaggcctcctagagcactggctcctggacagcaacctcctttggtgccttgtgaccagggccctgatggttcattagatggagccttcgagtcttagggagttgccgcagggtccccacagcggctcccgacggttgtgaaccagcatccattctccacggattccggcaacccgcctggccctggacgtgtctcaactggcccgcgtgaggggccgccccggaaatgacgcgctgccccgctggccaagcggaagtggagatggcggagctgtacgtgaagccgggcaacaaggaacgcggctggaacgacccgccgcagttctcatacgggctgcagacccaggccggcggacccaggcgctcgctgcttaccaagagggtagccgcaccccaggatggatcccccagagtccccgcatcagagacttctcctgggcctcccccaatggggcctccacctccttcaagtaaggctcccaggtccccacctgtggggagtggtcctgcctctggcgtggagcccacaagtttcccagtcgagtctgaggctcgactgatggaggatgtgctgagacctttggaacaggcattggaagactgccgtggccacacaaggaagcaggtatgtgatgacatcagccgacgcctggcactgctgcaggaacagtgggctggaggaaagttgtcaatacctgtaaagaagagaatggctctactggtgcaagagctttcaagccaccggtgggacgcagcagatgacatccaccgctccctcatggttgaccatgtgactgaggtcagtcagtggatggtaggagttaaaagattaattgcagaaaagaggagtctgttttcagaggaggcagccaatgaagagaaatctgcagccacagctgagaagaaccataccataccaggcttccagcaggcttcataatcctcggttccccagactcaccggacaccatcccctatgccttggagaccttctgtcacttggctcccttcttaccaccaccaagactgtcccactgggcctgacccacctatgagggaagaagtcccacctgggccagagggagttcatgtgttactcataacatgcatttcaataaaaacatctctgcggtgggccttgggtaggagagatgaacccttccggtgccaagctagtcccctctggtgtcctcgactgccctgctccctgtgtatctgcaaacctctgttctcccttctccattcatcaggaagggatctgctgggtaaagtcagactactgcctaccactttttcccaaagtagactgaaagcacatcctgtgctgggcggagcagctgtgtttggatggtttcatttcagcatgagaacagactcaaatagaacggggagacttttccctcaacaaaaggaaagacagtcctatttgcactgtatcacccttgagatactactgttacagagattagaacc

SEQ ID NO: 189 - DNA, 4129 bp, Homo sapiens
gacgagcgctgcactaacgcaggatccggctgccgaaggtcctcgccagcaggatgaagttaaaggaagtagatcgtacagccatgcaggcatggagccctgcccagaatcaccccatttacctagcaacaggaacatctgctcagcaattggatgcaacatttagtacgaatgcttcccttgagatatttgaattagacctctctgatccatccttggatatgaaatcttgtgccacattctcctcttctcacaggtaccacaagttgatttgggggccttataaaatggattccaaaggagatgtctctggagttctgattgcaggtggtgaaaatggaaatattattctctatgatccttctaaaattatagctggagacaaggaagttgtgattgcccagaatgacaagcatactggcccagtgagagccttggatgtgaacattttccagactaatctggtagcttctggtgctaatgaatctgaaatctacatatgggatctaaataattttgcaaccccaatgacaccaggagccaaaacacagccgccagaagatatcagctgcattgcatggaacagacaagttcagcatattttagcatcagccagtcccagtggccgggccactgtatgggatcttagaaaaaatgagccaatcatcaaagtcagtgaccatagtaacagaatgcattgttctgggttggcatggcatcctgatgttgctactcagatggtccttgcctccgaggatgaccggttaccagtgatccagatgtgggatcttcgatttgcttcctctccacttcgtgtcctggaaaaccatgccagggggattttggcaattgcttggagcatggcagatcctgaattgttactgagctgtggaaaagatgctaagattctctgctccaatccaaacacaggagaggtgttatatgaacttcccaccaacacacagtggtgcttcgatattcagtggtgtccccgaaatcctgctgtcttatcagctgcttcgtttgatgggcgtatcagtgtttattctatcatgggaggaagcacagatggtttaagacagaaacaagttgacaagctttcatcatcttttgggaatcttgatccctttggcacaggacagccccttcctccgttacaaattccacagcagactgctcagcatagtatagtgctgcctctgaagaagccgcccaagtggattcgaaggcctgttggtgcttctttttcatttggaggcaaactggttacgtttgagaatgtcagaatgccttctcatcagggagctgagcagcagcagcagcagcaccatgtgttcattagtcaggttgtaacagaaaaggagttcctcagccgatcagaccaacttcagcaggctgtgcagtcacaaggatttatcaattattgccaaaaaaaaattgatgcttctcagactgaatttgagaaaaatgtgtggtcctttttgaaggtaaactttgaggatgattctcgtggaaaataccttgaacttctaggatacagaaaagaagatctaggaaagaagattgctttggccttgaacaaagtggatggagccaatgtggctcttaaagactctgaccaagtagcacagagtgatggggaggagagccctgctgctgaagagcagctcttgggagagcacattaaagaggaaaaagaagaatctgaatttctaccctcatctggaggaacatttaatatctctgtcagtggggacattgatggtttaattactcaggctttgctgacgggcaattttgagagtgctgttgacctttgtttacatgataaccgcatggccgatgccattatattggccatagcaggtggacaagaactcttggctcgaacccagaaaaaatacttcgcaaaatcccaaagcaaaattaccaggctcatcactgcagtggtgatgaagaactggaaagagattgttgagtcttgtgatcttaaaaattggagagaggctttagctgcagtattgacttatgcaaagccggatgaattttcagccctttgtgatcttttgggaaccaggcttgaaaatgaaggagatagcctcctgcagactcaagcatgtctctgctatatttgtgcagggaatgtagagaaattagttgcatgttggactaaagctcaagatggaagccaccctttgtcacttcaggatctgattgagaaagttgtcatcctgcgaaaagctgtgcaactcactcaagccatggacactagtactgtaggagttctcttggctgcgaagatgagtcagtatgccaatttgttggcagctcagggcagtattgctgcagccttggcttttcttcctgacaacaccaaccagccaaatatcatgcagcttcgtgacagactttgtagagcacaaggagagcctgtagcaggacatgaatcacctaaaattccgtacgagaaacagcagctccccaagggcaggcctggaccagttgctggccaccaccagatgccaagagttcaaactcaacaatattatccccatggagaaaatcctccacctccgggtttcataatgcatggaaatgttaatccaaatgcttctggtcagcttcccacatctccaggtcatatgcacacccaggtaccaccttatccacagccacagccttatcaaccagcccagccgtatcccttcggaacaggggggtcagcaatgtatcgacctcagcagcctgttgctcctcctacttcaaacgcttaccctaacaccccttacatatcttctgcttcttcctatactgggcagtctcagctgtacgcagcacagcaccaggcctcttcacctacctccagccctgctacttctttccctcctcccccttcctctggagcatccttccagcatggcggaccaggagctccaccatcatcttcagcttatgcactgcctcctggaacaacaggtacactgcctgctgccagtgagctgcctgcgtcccaaagaacaggtcctcagaatggttggaatgaccctccagctttgaacagagtacccaaaaagaagaagatgcctgaaaacttcatgcctcctgttcccatcacatcaccaatcatgaacccgttgggtgacccccagtcacaaatgctgcagcaacagccttcagctccagtaccactgtcaagccagtcttcattcccacagccacatcttccaggtggccagcccttccatggcgtacagcaacctcttggtcaaacaggcatgccaccatctttttcaaagcccaatattgaaggtgccccaggggctcctattggaaataccttccagcatgtgcagtctttgccaacaaaaaaaattaccaagaaacctattccagatgagcacctcattctaaagaccacatttgaggatcttattcagcgctgcctttcttcagcaacagaccctcaaaccaagaggaagctagatgatgccagcaaacgtttggagtttctgtatgataaacttagggaacagacactttcaccaacaatcaccagtggtttacacaacattgcaaggagcattgaaactcgaaactactcagaaggattgaccatgcatacccacatagttagcaccagcaacttcagtgagacctctgctttcatgccagttctcaaagttgttctcacccaggccaataagctgggtgtctaaaaggacagcttctcttccactcaatattgccatttttccaaagaaacatgttaaaaaaaaaaattataagacatggactagtcctcattagcatgtttgcatagcaaccagtcaagagcatttacactatttctgctgatatactcaccttagaactgctcagaaccctggtgctttatttttgttttaatcttttgttgccagtgatgattttcctattctgcaaatagtgtatttcctggattacacatagtatggtttcctgaagtattctgataaatgtgtttttttaaaacctcaatatactttttagaaaaggagcatctggttatgcataaagcagagctaaaactaaatttctttcatgtcctccctacttcctcagtgtcaatcagattaaagtgtgtaatcct

SEQ ID NO: 190 - DNA, 452 bp, Homo sapiens
tcacaaacaagccttcagaatcagatgaatggaggacctttttatagccagaatccagtttcagatacaccacctccaccgccacctgtggaagaaccagtctttgatgagtctcccccacctcctcctcctccagaagattacgaagaggaggaagctgctgtggttgagtatagtgatccttatgctgaagaggacccaccgtgggctccacgttcttacttggaaaaggttgtggcaatttatgactatacaaaagacaaggaagatgagctgtcctttcaggaaggagccattatttatgtcatcaagaagaatgacgatgtattaaaaacaaagcaagctgagtctgaacaaatggatctttctgccatcatttgtacaatgctgagctgtctggattgaaataaaatgaccatttttatgtatgtcaaaaaaaaaaaaaaaaaccc

SEQ ID NO: 191 - DNA, 5390 bp, Homo sapiens
gggggtgaaaggtaagggggagcgagagcgccagagagagaagatcggggggctgaaatccatcttcatcctaccgctccgcccgtgttggtggaatgagcgttgcatgtgtcttgaagagaaaagcagtgctttggcaggactctttcagcccccacctgaaacatcaccctcaagaaccagctaatcccaacatgcctgttgttttgacatctggaacagggtcgcaagcgcagccacaaccagctgcaaatcaggctcttgcagctgggactcactccagccctgtcccaggatctataggagttgcaggccgttcccaggacgacgctatggtggactacttctttcagaggcagcatggtgagcagcttgggggaggaggaagtggaggaggcggctataataatagcaaacatcgatggcctactggggataacattcatgcagaacatcaggtgcgttccatggatgaactgaatcatgattttcaagcacttgctctggagggaagagcgatgggagagcagctcttgccaggtaaaaagttttgggaaacagatgaatccagcaaagatggaccaaaaggaatattcctgggtgatcaatggcgagacagtgcctggggaacatcagatcattcagtttcccagccaatcatggtgcagagaagacctggtcagagtttccatgtgaacagtgaggtcaattctgtactgtccccacgatcggagagtgggggactaggcgttagcatggtggagtatgtgttgagctcatccccgggcgattcctgtctaagaaaaggaggatttggcccaagggatgcagacagtgatgaaaacgacaaaggtgaaaagaagaacaagggtacgtttgatggagataagctaggagatttgaaggaggagggtgatgtgatggacaagaccaatggtttaccagtgcagaatgggattgatgcagacgtcaaagattttagccgtacccctggtaattgccagaactctgctaatgaagtggatcttctgggtccaaaccagaatggttctgagggcttagcccagctgaccagcaccaatggtgccaagcctgtggaggatttctccaacatggagtcccagagtgtccccttggaccccatggaacatgtgggcatggagcctcttcagtttgattattcaggcacgcaggtacctgtggactcagcagcagcaactgtgggactttttgactacaattctcaacaacagctgttccaaagacctaatgcgcttgctgtccagcagttgacagctgctcagcagcagcagtatgcactggcagctgctcatcagccgcacatcggtttagctcccgctgcgtttgtccccaatccatacatcatcagcgctgctcccccagggacggacccctacacagctggattggctgcagcagcgacactaggcccagctgtggtccctcaccagtattatggagttactccctggggagtctaccctgccagtcttttccagcagcaagctgccgctgccgctgcagcaactaattcagctaatcaacagaccaccccacaggctcagcaaggacagcagcaggttctccgtggaggagccagccaacgtcctttgaccccaaaccagaaccagcagggacagcaaacggatccccttgtggcagctgcagcagtgaattctgcccttgcatttggacaaggtctggcagcaggcatgccaggttatccggtgttggctcctgctgcttactatgaccaaactggtgcccttgtagtgaatgcaggcgcgagaaatggtcttggagctcctgttcgacttgtagctcctgccccagtcatcattagttcctcagctgcacaagcagctgttgcagcagccgcagcttcagcaaatggagcagctggtggtcttgctggaacaacaaatggaccatttcgccctttaggaacacagcagcctcagccccagccccagcagcagcccaataacaacctggcatccagttctttctacggcaacaactctctgaacagcaattcacagagcagctccctcttctcccagggctctgcccagcctgccaacacatccttgggattcggaagtagcagttctctcggcgccaccctgggatccgcccttggagggtttggaacagcagttgcaaactccaacactggcagtggctcccgccgtgactccctgactggcagcagtgacctttataagaggacatcgagcagcttgacccccattggacacagtttttataacggccttagcttttcctcctctcctggacccgtgggcatgcctctccctagtcagggaccaggacattcacagacaccacctccttccctctcttcacatggatcctcttcaagcttaaacctgggaggactcacgaatggcagtggaagatacatctctgctgctccaggcgctgaagccaagtaccgcagtgcaagcagcgcctccagcctcttcagcccgagcagcactcttttctcttcctctcgtttgcgatatggaatgtctgatgtcatgccttctggcaggagcaggcttttggaagattttcgaaacaaccggtaccccaatttacaactgcgggagattgctggacatataatggaattttcccaagaccagcatgggtccagattcattcagctgaaactggagcgtgccacaccagctgagcgccagcttgtcttcaatgaaatcctccaggctgcctaccaactcatggtggatgtgtttggtaattacgtcattcagaagttctttgaatttggcagtcttgaacagaagctggctttggcagaacggattcgaggccacgtcctgtcattggcactacagatgtatggctgccgtgttatccagaaagctcttgagtttattccttcagaccagcagaatgagatggttcgggaactagatggccatgtcttgaagtgtgtgaaagatcagaatggcaatcacgtggttcagaaatgcattgaatgtgtacagccccagtctttgcaatttatcatcgatgcgtttaagggacaggtatttgccttatccacacatccttatggctgccgagtgattcagagaatcctggagcactgtctccctgaccagacactccctattttagaggagcttcaccagcacacagagcagcttgtacaggatcaatatggaaattatgtaatccaacatgtactggagcacggtcgtcctgaggataaaagcaaaattgtagcagaaatccgaggcaatgtacttgtattgagtcagcacaaatttgcaagcaatgttgtggagaagtgtgttactcacgcctcacgtacggagcgcgctgtgctcatcgatgaggtgtgcaccatgaacgacggtccccacagtgccttatacaccatgatgaaggaccagtatgccaactacgtggtccagaagatgattgacgtggcggagccaggccagcggaagatcgtcatgcataagatccggccccacatcgcaactcttcgtaagtacacctatggcaagcacattctggccaagctggagaagtactacatgaagaacggtgttgacttagggcccatctgtggcccccctaatggtatcatctgaggcagtgtcacccgctgttccctcattcccgctgacctcactggcccactggcaaatccaaccagcaaccagaaatgttctagtgtagagtctgagacgggcaagtggttgctccaggattactccctcctccaaaaaaggaatcaaatccacgagtggaaaagcctttgtaaatttaattttattacacataacatgtactattttttttaattgactaattgccctgctgttttactggtgtataggatacttgtacataggtaaccaatgtacatgggaggccacatattttgttcactgttgtatctatatttcacatgtggaaactttcagggtggttggtttaacaaaaaaaaaaagctttaaaaaaaaaagaaaaaaaggaaaaggtttttagctcatttgcctggccggcaagttttgcaaatagctcttccccacctcctcattttagtaaaaaacaaacaaaaacaaaaaaacctgagaagtttgaattgtagttaaatgaccccaaactggcatttaacactgtttataaaaaatatatatatatatatatatatataatgaaaaaggtttcagagttgctaaagcttcagtttgtgacattaagtttatgaaattctaaaaaatgccttttttggagactatattatgctgaagaaggctgttcgtgaggaggagatgcgagcacccagaacgtcttttgaggctgggcgggtgtgattgtttactgcctactggatttttttctattaacattgaaaggtaaaatctgattatttagcatgagaaaaaaaaatccaactctgcttttggtcttgcttctataaatatatagtgtatacttggtgtagactttgcatatatacaaatttgtagtattttcttgttttgatgtctaatctgtatctataatgtaccctagtagtcgaacatacttttgattgtacaattgtacatttgtatacctgtaatgtaaatgtggagaagtttgaatcaacataaacacgttttttggtaagaaaagagaattagccagccctgtgcattcagtgtatattctcaccttttatggtcgtagcatatagtgttgtatattgtaaattgtaatttcaaccagaagtaaatttttttcttttgaaggaataaatgttctttatacagcctagttaatgtttaaaaagaaaaaaatagcttggttttatttgtcatctagtctcaagtatagcgagattctttctaaatgttattcaagattgagttctcactagtgtttttttaatcctaaaaaagtaatgttttgattttgtgacagtcaaaaggacgtgcaaaagtctagccttgcccgagctttccttacaatcagagcccctctcaccttgtaaagtgtgaatcgcccttcccttttgtacagaagatgaactgtattttgcattttgtctacttgtaagtgaatgtaacatactgtcaattttccttgtttgaatatagaattgtaacactacacggtgtacatttccagagccttgtgtatatttccaatgaacttttttgcaagcacacttgtaaccatatgtgtataattaacaaacctgtgtatgcttatgcctgggcaactattttttgtaactcttgtgtagattgtctctaaacaatgtgtgatctttattttgaaaaatacagaactttggaatctgaaaaaaaaaaaaaaaaaaaaaaaaaaaaaaa

SEQ ID NO: 192 - DNA, 2604 bp, Homo sapiens
ggctgggcacgcaccccaagaaggagcccatggaggcgctgaacacggcgcagggcgcgcgcgacttcatctacagcctgcactccacggagaggagctgcctgctcaaagagctgcaccgcttcgagtctattgccattgcccaagaaaaattggaagctccaccacccaccccaggacagctgagatatgtattcatccacaatgcgatacctttcatagggtttggctttttggataatgcaattatgattgttgctggaacccatattgaaatgtctattggaattattttgggaatttcaactatggcagctgctgctttgggaaatcttgtgtcagatctagctggacttggacttgcaggctacgttgaagcattggcttccaggttaggcctgtcaattcctgatctcacaccaaagcaagttgacatgtggcaaacacgtcttagtacacatttgggcaaagctgttggggtgactattggctgcattctaggaatgtttcctttaattttctttggaggaggtgaagaagatgaaaaactggaaacgaaaagttaatcctcttagaatacctataaaaagatgtaaactaatgtacctcagtaattaaatatgctgtcacaacatttaggaattaagacagtaacagtatagatatgggatcaaataatttagcatgtattatggaaaacactaacttattgtggcttgatcttcttaggacatcttttttaaaaagctgtttagtatcattttgtgtatattgttgaaatgctttttcatcaatagcagtcaacattttatcctttctttttatattcataatgttatttaagtgtcattgatgtactgtattgacttggggtttgcttatttgttacttaacatgtgtacatgcatgaaagcatttttcgttgttccctgatagttacatttcaaccttgggatttttccaaattacttaagatgtttaatgtcagttaaagatttttttaccctctttttgggaacatcaattttgtactgttatgcagtaaacatttataataatataatttcagtcatttcttaactgtcacatctattgaaaatggatatagatacaggttttaagtattttaagtatatattacttattttaattttctgactttactattttaagggccagagggttaatcacaaagagcaattatgtggtctccctgctacatgaaaccgtgtatactaacaagcgtacaatttttagttgattttttttaaccttttagtttcccagttttgaataattacatggtggattctgacttttgaggggaagcaaatgattattttagagtctttgaaatggggattgtggaattagattgaactaagggatttaacatgatgcttggaaattaagagactaaagctttttttaaaaaaaggtggaaaataggaactgtcaagaaggtttatggtataaatgatgaagttgaagtgatgtttgaaagattaatgagatacaatttatattatttggtaaggtttttttttttccctccaaagatgtcatcttctcatctgaatggaataagtctgaataccccatattcatactcctaatctcattatatcttatttagtgaattttatttatgaataatttctgttgaagtgaaaactagatatttaatattttgcttttttgctacatagtctactcaaaaattacatgaggagaaatcctttttccctttgtttttcttttttcttcttttgtggtatttaaagcatattttaggttgaagttacttatttctagtcttgtacttctggcttaagtataaccatgtaagaattataaattttagttttctgaacccttaaacttttttagcatgtggtctgttacacatgctaaaaaattagtcttacttgtaacagcgtaattaaacacatcatggaggagagaaacttaaaatagtattttggcttttgaagttatttgtgttgctaaatagatgcagaggttttacagcagtttattttaaggttttatttatacataattactttgaactcttcagagtagatattttttcacaaggcagtttgtcataaattctctcatgcgcttcagaatgcataagtgccatcctttaatcatagactttgaggagagaaagcataaaaatatagcatataatctaaaaataaatatataacatgcacaaataatgtgacattcttactgaatcaaatcatgattctagaacttgagatcttaaatagaattccggtttgtatcttccatataataaccacacacagataaccacacaaaaaatcctttgtaaaatttctgattgataggattagagtgcttaaatttttggggggggaagggtggggtaaagtgtaagtgctttcttttgtccctaacttgtgtattgatggcagtccactctgttttctaaaaatgtattttactgtggtgcttaacttcttattaattaaatcccgtatcagaaaccttgaaaaaaaaaaaaaaaaaaaaaaaaaaaaaaaaaaaaaaaaaaaaaaaaaaaaaaaaaaaaaaaaaaaaaaaaaa

SEQ ID NO: 193 - DNA, 241 bp, Homo sapiens
aaggaaggaaggaaggaaggaaggaaggaaggaaagaaagaaattcatccagcatgtccctttcttctcctatgggatttaccaactgacaaattctagtgctcctgccatcacccacacatgtgcagcaaagcctccacatttgcaaaatctaagtcaatctctaaaagatgcttcgaggaagcacccagttccttctgctaataaccgcagtgtgtcatgtgacacctccccctccccg

SEQ ID NO: 194 - DNA, 1839 bp, Homo sapiens
atggcagataataaaggtactgaaaacgattggtttttggtggaggcgacagattgtgaggaaacgttagaggaaacctcacttggtgacctagataatgtttcttgtgttagcgacttatctgatttattagacgaggcgccgcaaagccaggggaattccctggaattgttccacaagcaagaatcgctggaaagcgaacaggaacttaatgctttaaaacgaaagttactttacagtcctcaggcgagaagcgcggacgaaacagacattgctagcattagtcctagattagaaactatttctattacaaagcaagacaaaaaaaggtatcgaaggcaactgttttctcaggatgatagtggtttagagctatcgctgcttcaggatgaaactgaaaatattgatgaatcgacacaggtagatcaacagcagaaagaacatactggggaagttggggccgctggggtgaacattttgaaagctagtaatatccgcgccgcattattaagcagatttaaagatacggctggcgtcagttttacagacctgacgcggtcgtacaagagcaacaaaacctgttgtggagattgggttttggcagtttggggtgtccgtgaaaatttaattgacagtgtaaaagaattattgcaaacccattgtgtgtatattcaattggaacatgcagtaactgaaaaaaatagatttttatttttattggtacgatttaaagcccagaaaagtagagagactgtgataaaacttataaccacaattcttccagttgatgctagctatattttgtctgagcctccaaaatcaagaagtgtggctgctgcattattttggtataaaagatctatgtcttcaactgtttttacatggggtacaactttggagtggattgcacagcaaacccttattaatcatcagttagattccgaaagtccctttgagctttgtaaaatggttcagtgggcctatgataatggacatacagaagagtgtaaaattgcatattattatgctgttttagcagatgaggatgaaaatgcaagggcatttctaagctctaattcacaggcaaaatatgtgaaagactgtgcacaaatggtaagacactatttacgtgctgagatggcacaaatgtctatgtcagagtggatttttagaaaactagataatgtagaaggttctggtaattggaaagaaattgtaagatttttaagatttcaagaagttgaatttataagctttatgattgcatttaaagatttgttatgtggtaagccaaagaaaaactgtttgttaatatttggacctccaaatacaggaaaatcaatgttttgtacaagtttattaaagttgttaggagggaaagtgatttcatactgtaacagtaaaagtcagttttggttgcagcctctggctgatgctaagatagggctattagatgatgcaacaaagccatgttgggattatatggacatttatatgagaaatgcattggatggtaacactatttgtattgatttaaaacatagagctcctcaacaaattaaatgcccacctttacttattactagtaatattgatgttaaatcagatacctgttggatgtatttgcatagtagaatatcagcttttaaatttgctcatgagtttccatttaaagacaatggtgatccaggattttccttaacagacgaaaattggaaatctttctttgaaaggttttggcaacagttagaattaagtgaccaagaagacgagggaaacgatggaaaacctcagcagtcgcttagacttactgcaagagcagctaatgaacctatatga

SEQ ID NO: 195 - DNA, 1368 bp, Homo sapiens
atgaaacctagggcacgcagacgtaaacgtgcgtcagccacacaactatatcaaacatgcaaggccactggtacatgtcccccagatgtaattcctaaagttgaacatactactattgcagatcaaatattaaaatggggaagcttaggggttttttttggtgggttaggtattggtacaggggctggtagtggcggtcgtgcagggtatatacccttgggaagctctcccaagcctgctattactggggggccagcagcacgtccgccagtgcttgtggagcctgttgccccttccgatccctccattgtgtccttaattgaggagtctgctattattaatgctggtgcacctgaggtggtaccccctacacagggtggctttactataacatcatctgaatcgactacacctgctattttagatgtgtctgttaccaatcacactaccactagtgtgtttcaaaatcccctgtttacagaaccgtctgtaatacagccccaaccacctgtggaggccagtggtcacatacttatatctgccccaacaataacatcccaacatgtagaagacattccactagacacttttgttgtatcctctagtgatagtggacctacatccagtactcctcttcctcgtgcttttcctcggcctcgggtgggtttgtatagtcgtgccttacagcaggtacaggttacggaccccgcgtttttgtccacgccacagcgattggtaacttatgacaaccctgtctatgaaggagaagatgtaagtttacaatttacccatgagtctatccacaatgcacctgatgaagcatttatggatattattagactacatagaccagctataacgtccagacggggtcttgtgcgttttagtcgcattgggcaacgggggtccatgtacacacgcagtggacaacatataggtgcccgcatacattattttcaggacatttcaccagttacacaagctgcagaggaaatagaactgcaccctctagtggctgcagaaaatgacacgtttgatatttatgctgaaccatttgaccctatccctgaccctgtccaacattctgttacacagtcttatcttacctccacacctaataccctttcacaatcgtggggtaataccacagtcccattgtcaatccctagtgactggtttgtgcagtctgggcctgacataacttttcctactgcatctatgggaacaccctttagtcctgtaactcctgctttacctacaggccctgtttttattacaggttctgacttctatttgcatcctacatggtactttgcacgcagacgccgtaaacgtattcccttattttttacagatgtggcggcctag

SEQ ID NO: 196 - DNA, 959 bp, Homo sapiens
ctggcggcggcggccactctaaccagcgcaaaatgtccctggaacaggaggaggaaacgcaacctgggcggctcctaggacgcagagacgccgtccccgccttcattgagcccaacgtgcgcttctggatcaccgagcgccaatcctttattcgacgatttcttcaatggacagaattattagatcctacaaatgtgttcatttcagttgaaagtatagaaaactcgaggcaactattgtgcacaaatgaagatgtttccagccctgcctcggcggaccaaaggatacaagaagcttggaagcggagtcttgcaacagtgcatcccgacagcagcaacctgatccccaagctttttcgacctgcagcgttcctgcctttcatggcgcccacggtatttttgtcaatgacgccactgaaagggatcaagtccgtgattttacctcaggttttcctctgtgcctacatggcagcgttcaacagcatcaatggaaacagaagttacacttgtaagccactagaaagatcattactaatggcgggagccgttgcttcttcaactttcttaggagtaatccctcagtttgtccagatgaagtatggcctgactggcccttggattaaaagactcttacctgtgatcttcctcgtgcaagccagtggaatgaatgtctacatgtcccgaagtcttgaatccattaaggggattgcggtcatggacaaggaaggcattgtcctgggtcattcccagaattgctgggacaaaggctgttagagaaaacgctagccatccagaaatagtgcatgtttgggaccctcagttcttgattcctgaagttcttcaacctaactttttaaaaggacccagtatttcaggaaaaacccaggtcatgtggatttgaaactgtcttgtaactgtcctggcatggaactgatggtggcatttcttttaatttttcaa

SEQ ID NO: 197 - DNA, 1854 bp, Homo sapiens
ctccaaccctctgctcccgtttctccctctggttcatagcccgcgggacagagcagccctggattgggaggctcctcaggtctcaggctcaggtgcagaagcagagcccctaactggaaggctcggaggtgggccggtgaggcaagcaagccctgtggggggttgaggacagcttgggttggatgtccctcactgcagcctgtccgtggatgtctctgccttaagggaattggaggtggaaccatccagtcttgaaggtcaacggagcgtgaagagaggagcgtgcagcttgagggtctaaggataactctggggccatgacagccatgagtctcacagaggaccccgagacttctgtgctgcgagtaaccggacttgttctgagacctttgccctagaggatggccaaggggctcctggtgacctatgccctctgggctgtggggggccctgctgggctccaccacctgtacctgggaagggacagccacgccctgctctggatgctgaccctggggggaggtgggctgggctggctctgggagttctggaagctcccaagctttgtagctcaggccaacagagcccagggacagaggcagagccccagaggggtgacaccccctctgagtcccattcgctttgctgcccaggtgatagttggcatctattttggccttgtggcactgattagcctttcttccatggtcaacttctatattgtggccctcccactggcagttggcttaggggtcttgctggtggctgctgttggcaaccagacctcagactttaagaacactctggggtcagcatttctcacttcacctatcttctatggccgccccatagccatactgcccattagcgtggccgccagcattacagctcagaggcatcgccgctacaaagctttggtggcatcagagccgctcagtgtgcggctctatcgtctgggcttggcttaccttgctttcacaggcccactggcatacagtgccctctgcaacacagctgccaccctcagctatgtggcagaaacctttggctccttcttgaattggttcagcttcttcccccttcttggccgcctcatggagtttgtcctccttctgccttaccggatctggaggctactgatgggggagactggcttcaacagcagctgctttcaggagtgggcgaagctctatgagtttgttcacagttttcaggatgagaagcgtcagctggcttaccaggttttgggcctctcagaaggggcaacaaatgaagaaatacatcggagttaccaggagctagtgaaggtctggcacccagaccacaacctggaccagacagaggaggcacagaggcacttcctggagatccaggctgcgtatgaagtcctgagtcaacccaggaagccctggggatcccggaggtgaaaagaaacttccccctgaggactgactcttcctagcagagctgggcaacttgtcccaaatctagctttgcccacgaatggcatcccaacagagttaaagaaactgcttgcaggggctgggcgtggtggctcatgcctgtaatcccggcactttgggaggccgaggcgggcagatcacgaggtcaggagttcgagaccagcagcctggccaatatggtgaaacttcgtctctactaaaaatacaaaaaattggccaggagtggtggcaggcacctgtagtcccagctacttgggaggctgaggcaggagaatcacctgaacctgagaggcggaggttgcagtgagccgagatcacgccactgcactccagcctgggcaacaagagtgaaactccgtctcaaaaaaaaaaaaaaaaaaaaaaaaaaaaa

SEQ ID NO: 198 - DNA, 2083 bp, Homo sapiens
catcaaaagaatgaagaacataagaaaaggtaactacatcagtaaatatattgcttttttcttcttatttaaatgctttaaaagagaattgattgtttaaataaaaatatcaatgtaggctacatgcagtggctcacacctataatcccagcactttgggaggctgaggtgggtggatcacttgaggtcagaatgttcaagaccagcctggccaacatggtgatctttgtgtctattaaaaaatacaaaaataagccaggcgtggtggcgggcacctgtaatccagctactctaaggctgaggcaagagatcacttgaatccaggaggcagaggctgcagtcagccaaaattactccactgccctccagcctaggcaacagagtgagaatctgtctcaaaaataaaaataaaaataaatcaatgtagtatcagacttatatgtagaaattaaatatttgacaaaataacatgaaattataaggagagaaattaaaatttattattttaaggttcttaatatacaaactagtatattatcagttgaagatagtctgcaataatttaaagctatatactataaacactaaagcaaccattaatatagcaaaattgaaaatatgaagttaatagggcaacaaaggagataaaatgtaattttaagaaatatacaaataattacaaaaagacagcataatagtaaaagagaatgaacagataaaacaattataaaacaaacaccaagctgagagacttaaacctaatcacacgataatcacactaaatgtaaatggtccaaatacccccatcaaaaaggagagactttcaaatagataatgaaaattcaagacctaaccacaaaaaaaacacacttagaatataaagtcacagatagggtaaaagtggaagaatgacaaaagaagagacattcttcaccaagagtcctcggggtttcctgcttcagcagtgcttggacggaacccggcacttgtcccccacccaggccagctgcccatagccagccctccgtcacgtcttcactgcaccctcagaccaccccaaggcccccaccgccgctccagcgccacgcagccaccgccgccgcagcctctccttagtcattgccatgatgactgcatccaactcgcaggtgcgccagaactaccaccaggactcagaggccgccatcaaccgccagatcaacctggagctctacgcctcctactttaacctctccatgtcttactactttgaccgtgatgatgcggctttgaagaactttgccaaatactttcttcaccaatctcatgaggagagggagcatgctgagaaactgatgaaactgcagaaccaacaaggtggctgaattttccttcaggatatcaagaaaccagactgatgactgggatagtgggctgaatgtgatagagtgtgcattacatttggaaaaaaatgtgaatcagtcactactggaactgcacaaactggccactgacaaaaatgacccccatttgtgtgacttcattgagacacattacctgaatgagcaggtgaaagccatcaaagaattgggtgaacgtgaccaacttgcacaagatgggagcacccgaatctggcttggcagaatatctctttgacaagcacaccctgggagaaagtgataatgaaagctaagcctcaggctaatttccccatagctgtggggtgacttccctggtcaccaaggcagtgcatgcatgttggggtttcctttaccttttctataagttgtaccaaaacatccacttaagttcttttgatttgtaccattccttcaaataaagaaatctggtacccccccccaaaaaagaatgacaaaagatagcacatgtgaatacaaataaaaagtaagctactgtggctacattcatgtcagacaaagtaaatttcagagtagagaatattaccagtaataaatgattatttcatagtgataaaggggtcaattcatgaaaaagacataatcctaaacctaatacaacagttcaaaataaatgcagcaaaaactggaaggagaaagaaacagatcctctagagtcgacctgc
